United States Patent Application Publication US 2005/0272043 A1 - sequence listing, part 2

SEQ ID NO: 6 - DNA, 285300 bp, Homo sapiens
  misc_feature (3185)..(3185): n is a, c, g, or t
  misc_feature (7922)..(7922): n is a, c, g, or t
  misc_feature (10272)..(10272): n is a, c, g, or t
  misc_feature (28873)..(28873): n is a, c, g, or t
  misc_feature (29105)..(29106): n is a, c, g, or t
  misc_feature (35901)..(35901): n is a, c, g, or t
  misc_feature (36488)..(36488): n is a, c, g, or t
  misc_feature (40260)..(40260): n is a, c, g, or t
  misc_feature (52594)..(52594): n is a, c, g, or t
  misc_feature (68230)..(68230): n is a, c, g, or t
  misc_feature (70027)..(70027): n is a, c, g, or t
  misc_feature (83514)..(83514): n is a, c, g, or t
  misc_feature (89477)..(89477): n is a, c, g, or t
  misc_feature (108762)..(108762): n is a, c, g, or t
  misc_feature (109378)..(109378): n is a, c, g, or t
  misc_feature (113639)..(113639): n is a, c, g, or t
  misc_feature (115312)..(115312): n is a, c, g, or t
  misc_feature (115315)..(115315): n is a, c, g, or t
  misc_feature (127817)..(127817): n is a, c, g, or t
  misc_feature (138224)..(138224): n is a, c, g, or t
  misc_feature (140476)..(140476): n is a, c, g, or t
  misc_feature (147488)..(147488): n is a, c, g, or t
  misc_feature (147500)..(147500): n is a, c, g, or t
  misc_feature (147527)..(147527): n is a, c, g, or t
  misc_feature (147534)..(147534): n is a, c, g, or t
  misc_feature (171395)..(171395): n is a, c, g, or t
  misc_feature (195657)..(195657): n is a, c, g, or t
  misc_feature (196415)..(196415): n is a, c, g, or t
  misc_feature (196417)..(196417): n is a, c, g, or t
  misc_feature (212236)..(212237): n is a, c, g, or t
  misc_feature (212442)..(212442): n is a, c, g, or t
  misc_feature (212445)..(212445): n is a, c, g, or t
  misc_feature (212455)..(212455): n is a, c, g, or t
  misc_feature (215163)..(215163): n is a, c, g, or t
  misc_feature (217657)..(217657): n is a, c, g, or t
  misc_feature (217725)..(217725): n is a, c, g, or t
  misc_feature (231757)..(231757): n is a, c, g, or t
  misc_feature (231762)..(231762): n is a, c, g, or t
  misc_feature (235827)..(235827): n is a, c, g, or t
  misc_feature (241414)..(241414): n is a, c, g, or t
  misc_feature (248915)..(248915): n is a, c, g, or t
  misc_feature (250079)..(250082): n is a, c, g, or t
  misc_feature (250575)..(250575): n is a, c, g, or t
  misc_feature (252326)..(252326): n is a, c, g, or t
  misc_feature (261590)..(261590): n is a, c, g, or t
  misc_feature (278290)..(278290): n is a, c, g, or t
tccaatctgtaggttctcctggagattgtcacaatctgccagctctctgggaatcacagaaccatcatgtccccttaggatggcagaagatgtggcacagcctcaatctccaacactgaaacactgagagagcttgatacgttccttaggcagggcagaaacatcacagcacttcacgttaggaaccacgaaagagtgggaacctgrcacacgtgggaagggcacatccccagaggacagaggacaagggtggcacacacacctacagagaccgcaaccacatcacagtgaaggaggaggacagctaacggggtgggaggtgggagctttttgtttgtctgttgctgtcgttgctttttagagaagccagggtgggccaaatggagatattgtctcaagaccattacacacagcttcccaaatctgtagcccttttctgtaacctcatgaaagctgtgtcagactcagtcctggtctgaagtaccmaagcagcccaaggcaaaacctcatctgcaagaggcaatgcggcgttgggtcccaaggatcagtggggagggtgttcaaaagagcaaaaagggaaaccctctttcataggcatttctctcactggagacccactctcttggtcattcctttatgactgagagtctcagaaggagttgtgagtgtgaggtaaaagagacaagcaagcattttggaatgatggggataaaatgttgcagtggcttccctctctggtgcccatacctggaagaagcaatcccaggtttgcttcgtatctgcaggtctagagacatcaatggaggcagcaattggagatctcagtgtgtttccagggtctctgactcaactagagggcatccaaggcctggtggagcctgtgcaggcctgagcttcctcgtggagcagcaggtaggcagctcattcccagggacctggtcatccttcctaccataggagccacctgccaaagcccacccagaggaatcccagcgttcacaaatggaggcgccctcaccaaagccactggaccagcctgtccctgagaagagacacagaggggcttcagcaatgagaagaagaaaaccaatttcttttggcttcttagcagagatgctccatgtcttggctgtcagagaaattgagcttacaaattgccctcaccctgaacccacttggcaacggggagatgacctggttgaggtctagttctggcttttgtgaatcgaccgtgtgacgtagacagcacagcatcaggccaggaaggcgcctgatgagaccgtgttctcagcctgagagcgcgctcaagggcaggtgggagatggagccttctcagagctcagccactggctcttgggctcccaggttcatccctcaaggagctggggacctgagggctcagggcccaccactggctgcctgggggaagtgctgccagtctggtgtggaaagggtccaagtcagaggcctttgcctcaccccttccaccagcagggccattcagagaagtcttggctcaaaagaacgttgcccacaggctttcaagtaggtgagtggaccaaacccctgcatgcttttcaggctgtcacgcactttaaaaccagactcacagccaagccttgtgtccctgactacctccacagagatcaccagaattctcctcactgggagtcatgtgccatccagggccccagaggagccttcccttgggccaccccccacagagaagctatagctctgagccracatccacacatggacagatacacaccttcccccaagcccaggcattttgcttgaaagcaaggttggtgtggcttcttcagggaataactcaaagctgaaatctggctgtgacacgtgtggagaaaaggaaagatgaaacaaacggtttattcctaatgctgtcaacacaaacaacygagagtctaagccagcacgaagctaggatctgacaagcacctggccaaaggtgagcatggaaggtttgctgaaaacctctctgatgctgggtttcatccctgcacacaccagcagtgccagatacaggcgtggggcagctgaccttgctggggtctggtggagtgtgcccaatctgtacttgaagcccccacccccccagtcccgctctctgctttctctagcagggaaaagaccactgtgggggtcattttctgcctctgatcaggmcctgccagttgcacctccctgccttccaccccagaaacccacaagcagctctggggacactggctgcccaacacactccaggccaggtgacttcatcagttcaccagttttaatgctgaggatgctgtcatccaagggcatccagtgcttggaaaagcagattaaagcaactaggctgaggtcatctgttttcttcccccgacccctcagcctccacagggtagaaatcactggatgcctccacctgcttgtcttctactgaggaacacgcatcctcaacagagaaacctacatatacttacaccttccgtgatggcgcgatacttgacctacaatcacgattgcttggcagagcttaatttcatggctgaaaagcaacttgaaggctaggccagcatgyggtttattttccagcccctacaggacctagagcattgcctcgcacayagtcgatgccctgccaagggttttaatttagccagtaacagcctgccctgcaatgattcatggcaggcaaaagatgggttcattttccttcagaggaaaaacccccagggtggacaaccatggcagatgagtggggggcagcttggatggactctgttccctttccygrccagaggagcacaaatgccccctaagcatctgaccattcattgcaaaagcatgacccatctgctttcccaaatgccatgtggaccagaygcattggtgagccagggacgccctgcctacctaccccgcctctctccagccacctgctccccacctcctctgctctgagataatcattctatattttcatgctcttgctcacatatcaggcagtgtttctgtcctttttttttttctagtacctaatttaggcttcttcaactacatgttgaaaatgtgcacggggtatattttctttttcctwtacgccactgttgcttcccacttcccacctccaccccactccttagcatctatcacggcagagggaagggaggaancagtgcagggaagggagagggcaggaggagaatcagggtctcagtggggagtagacatggaagggcaaaccaagtccgtataaaccacaaaccccattctagccataaaagctttgcatccctttgatagcagaattgagacttttgaagtacccaactattgccaaatrtctttcatgaaaagaagcataggtgaacgaagggaagagaaggagagaggtcgcggagccagtagctttccaagcacaaggctccctttgcaaccctggtggctgtgcagaggctgagagctggaggagcaggactggagaagacttcaggaaagatgcaccttgcctggcagcccctggctctccctcttgtcctggagcaacatcaaagtttccctttggttcattaagtagggcgtgtgtgtgtgtgtgtgtgtgtgtgtgtgtgtgtgtgtatgtgcgtgcgygcacgcacgcgcatgcacatgggcattcctgttctcatcatcaatattcataacattgaaatgaagaacagagatgcagagaggcgagcaaatgagcaaatgggatgcagtgagtgaaaatataacctgggagtctgtagggttgtgttgctgagggaatatrtaggccccaggggctcacaggcctctgccatttcctacaaggcccacttacctgccctcccgtccccaccatggccgcgtttatttgctagacagggttggtgccagcctacagggccattttgctcaatgcctgggctagaggtcatgataagtaattatatctctgtccaagagggttctggctgcctgccagtcctggttcctgccttcctctggcctgccctgggaaatgtcgccatcagcaaaatactcccttctcctggtggagccaaagaaggggaactgtggaaggtccctctctcaaggccacctgccctatgacctgaggttggcactggagcagagaaagggaaggagtggggacagaagctggaacaaagggccctggggagtcacctcaggaccccctcacagccagggctcactcaraacccagagagagcctgttcccaggaacccactcacttccaaatctttcccctcatgcagggagttccctgttccttctagaaaacccatggtasggaactggcaagcccggacccctcctcctcagagtttcctgacagctcttcctttgggcctctcttctagctgcctgggctgcgcacatggagggggcgcccgccgcacagccaggcctccccggggacagctgctgagaggctctaaggcagttcccactcgctctgcctgggaggytgtctatcctcccacatcccgggtgcccagcaggaagcacccccatcttcctctcccctccttccccctgccccactctcagctgtccactcacagaccagagggtctccagcctccctaggaaggggttcccagctctccaagacccaccaccagctgcccaaaggccttgaaccaacccatctgtcccattgtttccacactcagggctggtggccgtggcctctggcagagaatcataagcagactcccaaaccctgggaatgctcagaaatgggggagggagccccaacccccagacagctatggagcccaccttctgaccacggaccagttagactctatggcaagctggggttcaggtagggagattcataggcctgaggcaaattaaaacagctgttccccaccatcaccatccttccccttcacctggtatccaaaagcatrctttggggatgggagtaagatttcaaaacgggcaacacacagcaggaagrggaggagctctgtccactttgcagaggggagaggagcaggatggccagtccccctcttcccttcccagctactggtgtcctgggcttgggggacaggggcctgggggcctgacccctctggtagcagtgcctggaaatgcttcactccccaaggctgcaggcatgatccagccctccctcactgccttctctccccagctgggtgaggggcttactttgccctcagaagcatccctgaaaccccacacaaccaacgggcggcctcaagaaagagggagctgaatcagtgttcagaactgggcagaggtttggcctttttacaaaataataataataataatctgttgcccaggatcacaagcctcagaaaaaaaaaaaagagttacaatcactgttcactcccacctgctgccctccagctccttagctcgaggatttctccctgaggacatccagctctctgcctttttccaccagagatcctcacccctcccaaatgccctcccaccctcccttccccaggcacccctgtctttctccctccccaggaatggaagcctgctaaaagggacaccaagtcaccactgctaccaggagccaggcctgggacttgcggcatcctgtgggagtgtgagcgtggctctggccagagccaacttctccctcrggctgagacatggggaccccctgaagaggggctaggaggggcagccggggagtgagagaagaaggggctgcttctgtcccagcacttccacgacaggctaaaaaccagcctggggggcagggatgtggtcctcagggcccgccctgggccacgggcggcgcaacaccccctacctcctcacacacagacccaaagaggagactataagcccctcttctttgagtcctgaggcctgaggttgccagcaacctttcttcagcggcataaaagagcacaggtctcctccacttgccccgaaaggaaaagtaataacaatcatctcatttttcttccttaaaacatcaaaactttttaagcggagggttgaaaggaagcgggctgtattcaaagcacgaatacaaaaatgcaccaggagtgtgcaaccctccagggtatcatgaaaccatcactgtgaaacccaaaccctcccccaacttcaaaacctgttctcttccccagttctggaggaatctggcctccttccctcccttccacccacccacaggctcttccctggttccagtcggctgggctcagcctgcccaggcttccggcttcctacctcgccctggggcagggacaggagcaggggagccttgggacctgctggctcctgcttcaggggcgatgagtcagtgaggggttccaaaggaaagccagaatgtcaatctcctagcaggagccctgtttctatttccacataatgttgcctgcactggatttgctacagatccaaaaagcagggtttcaaaaatgcctacaggaaacaggatttccacttccggttgggtstggcagcctcacctctctggtttgctggagccacagtacagaggggtgaagcccagcaaagttctcctggctgttcccagcatttgagccggaagacaaccacatcattatctccatttggtggcctctgcagaaaatgacaatagctaccatggagtggggaccatcatcatgccagacccgggccrggatctttaccaatgtcacctygaatacctgcaaagaccatgctggataggccatgtttccccaccttacagacatgtgaaatgaggctcagagagttgaagtcattggcccaaggtcagtcagctagaaagtggcagtgttggtcggaaagtgagcgttacccatgaactgaaacaaatcatagccctctctaaaagtcacctttccattctcaactgcattaatcttatagaaggagtatcctgagtaccttcattttaaagtccccaaccccatgtacatccctcacctccaccccacagcccatgcaagtcatgatttccttggtcgcagcccagccctggcaatataaactccctttggtcacaagggagatttgaagaagacgtctaacattggctaatgcacacaagaaggcggacatggaaaacatcyggagttcttcccagacaagcatggctctgcagtgcttgtttatgtaacatgatgcttaagagtcccagtgtcactctggaataggcagggcaagtgttactatctccactttccaggtgggcaattgaggttcagggaggttaggtgacttgcccagtgtcacacagctactccatggcagaggcaacacaaaaactctgatccttcacatgcatcctatgattctatctcattctctggggttcaaaaaaaagagaccaatttaaagtttaccaaccccgtcctcttttgaacacagaggtgataaatgtgaccacggagacttttgtctgcttgtagtaccctgacagtgccagcccacaagctggcttgctatccccgctttccagatggggaaactgaggcctccaaagatgaagaatgggttgggcccattcttcagggagtaatgaagctgagaggggaactccggggccatcctaacgtcactccagagccctgaccctcaccagtgcaggcaagttccagtgccctgccttggcctgggagacccagctgaggctcagcttgtgtaggcagagcagacatggggctgagatcgaacagggctgccctatcacctgcacttctgtggaaaacaaatttgcacatactctgaagaggacgtgtgaagttgtagagccacagtttggggtttcggacttgctttttaaacttttaagctattgtggcacttgggaayatttggggaacttttttttctaaatttaaattaaaatgacgctcaaaancaattattagcctttggagacagcctgctttgggttttgtgggaagagagagagctggagtagtcaggagaaaaaatgtgcccctctgatggaatgtcaccctccctatccctccctgggccttcaggattcagacaagctcaccgaccagcaggcggaaggaaattacttatgaggaagatgaaaattccatccggtcgggggccctttaaatgagaccattatgtatgtgtgtgattccctctgaggccacaggcccctgcaggagagtgacccccatcgcttgccacaggtcactctgctgaagcgtgggggagacccacactgcttggtttcatgccaggctgccctgggtccactggccaagagcaattagcctagagaggagcactcctgccgagggacagcacaaatactgcggccgggcagaggtggcccaactagcccgagtctccgggagcgtcctcaggagctgaagaactaaaaataacctgggcctttgttgtgagcagccagaccacagagatggagctgatttcagagaagccaagcatgcgcgagggttccgctcaccgagacctgccctttgggcaaatgatttttccagaaatatgtcagttattgtgctgctgctgcgattcaaagtcagcccaatccgctccagccctcggggctatcttccaacacacagagttctcggaagctcagcctccccacctctttcttctaracacatttttttttgaaaacaagagtcctgcatgtttggggagcttaggagacaagagcagcccccgcactgagagttctaaaatgtggccaccctggtcgtgaataatgaccatgtcaccctaattatttgtttagataacaatcttctctcccccatcctaaaattcccagtcaggtctcagtagacaatagcgaacaaacactacgtggaaggaagaaattacttggaaaaaggaattcagagcgtcgcatcaatactgaaggtttctcaaagctgcagccccctgtatccagcattcggacacatgattgggcagccttcgctccccttcctggttcttcagtcccaccaggagaagctgaaccaggtctccagaaccaggtgggctgagaggcagaggcttgaccgtcttcctctgtccataggccatgactggtctcacctaaaggatgccccagctctgaaggtcaaggaaccagcctggcctcttgcaaagtctctcccgatggataacaagtactgactggctatggcggggccttggcaccatttccacaatgtttcctcccatgtctctgcgcgtctccctccctccccgcccccatctagtaactttaagcagtggctcaagaccaggctggctgtggatgccactgctggggttctagaaggcaactctttgtctccacagacaccaaggaacaagaaagggtttcaagaccccaagtctagaagtttccagtgaggcttgccataaacgacaacttctccacagccctttgttcctcaggtgagaatttcaggatgcagaccctaagctgggggcacgggggctgtgccaagatttcttggaacacaatagataaaaaaacaccacactacacacaagtaatggatgagtggtcaggaaatggcttcccttaaaatgggaaccaatgagagggcctcggtgctagggtaaaagtgagaggggttccacagggctggggccggaggtgttctcccaaagtgcaacttccttccggtagagacaaggaggtgctggctgaagttccgtacatatcgggggaggtcaggagatgcctcaccctcttcgttccatgtgtccctgcccctctgggactatttcttttccttgcagttggtctggctggatatgtgrgaggagggcgcgttctggtttgaactgggctctgctttaggatctccagcagcgagtcacattctgtgacctggggccctaggcctggcagccaaaggctgaggctttctctttgagcagttcccagcataagtggcagctccagcttcctgcaagaaatgagacggctttagtagcagcccctctgctaactctggagccccaccccactggccctaacttcttgtaaatcctgtttcctttgaactttggcaatgcagaaaccaagtcccaggcctgaaaacgtgccagagtctgtggctcagcagaaagcaggtgctcagaggagatgggctcaactcttatcaagaccctcactactagcgtcatgcctccaaactagtgtcgccgggcctgcgccagttctcctggaagctcacacctcccggtcatctccactgcatgtctgggaaaancttccttggccctcaagttgaaatttcagctgcttggactgtgcctcagtttcctcatctgtaaaatggcagtcgtcgtacctaccttgtggggttgtgatgattaaatgagacaagacatgaacatgtaaacccattagcataaggcctgtaccatagtgagagctcagtaagtgctagtagtagtagtatctgttgctgttcttattgttgacttcatcatcattaccttctgggggctcagccaccgggggatttaaacagtacatgtgatagcctcggtcacagtcatcgcagaagagtagctggtcctggtggaacacagagtaagcacagaggaggagagattccattattcggggccaatgtctggcccccgcttacccatcagccttatttccacgtcggtctcactggatcccctttccaggccccacttggagtcctcactgtcccctgaacacgcctgtgcttttcccacaactggagtttccccctctacctcccagcctatataaatcctacccccattttagggttctgctcaactygtacctcctccaagacgccttctgtgactaacacctcacatccaaatttaaagggatcccttattcttctgaacttccaaagccaatagctctgcttccaaagggcagaaaatgtctctattctccatgactttatatatttgaagatcttaattgaattcttctggactccactctctccatctgtgaaatggccaacagctgtactgggatgaacctcagaacctcttcagggtttcattagaatgtagaaaaatgcaagtagcgccatccctcggcttccagaagcttcctcactgtctggaggctggagcccgggtgagagcagggcaccccagggttgtggttaacttcaaaggacacaggccatatctttgcacctatggctacttctgcctggaggctctcccaggccctgaccctttctctgcatgtccattccctgcctgcccttcaagtacgtcttcttcaagcacttcttttccacaaagtctttgctaatctacctcaactggaagttgtctcttccctcgtgcagccctgtggtactttccctttctgtgacatttaaatgcattttcctttacgttacatgcctggcatgtggtagacatctaatcacgtttgttttcttggctgggygctgtggcgcatgcctgtaatcccagcacttagggaggccaaggcgcgtggttcacttgaggtctggagttcgagaccagcttggccaacatggtgaaaccccatctctactaacaatacaaaaattagccaggcatggtggcgtgcacctgtaatcccagctactcaggaggytgaggcaggagaatctcttgaacccgggaggtggaggttgcagtgagccaagatcgcaccactgcactccagcctgggcaactgagtgagactctgtctcaaaaaaaaaaaaaaaaagacatctacatgtttgttttcttgaatagttcatttggaacatgcctcttttttccaccctttatcccctttatggactataaagcccttgggggcaaaatcttgttttcctcatcactgcatccactgtagagacttccttgcatacaggagctgctcggaaactgtttgtgatctggccccaccccctagtttcagctctgttctatttggtgattgttgaaactgtttggatggcttatgagcctttttcaaaataaagttttatatcaaatctcaccttggcccccaccagtgcagaaatcctggataaaattagatatagctgttggaatccccagggagcaagcaatgagggctttttttgtcatgctaaaacccgtcagtggggcaacaggaaagcttttgaagagttatcaayaggggagtgatacgatcagattgcagtttagaaagatcttactagctgctatgtaagagtagatacccagtgggggagaggttcattcaagaggcccggggaccagttaggaagctgctatagctatccaggtgcgtgatgatggtggcctgaattacaattgcggcatggagaaagaaatgggtcttgctcccatttaagcatcattgattagatggggagagtgatagggaagaagccaaggatgccgtctgggttgtggcttggtcagcaagccagatgatacagccacccaatgggacatgggaggaagagcagactcatgggagggagagggcaacctcagctatagacatgttctacagatagggatgacctggaggctgttgaagagagcaggagagaagtctgggcctgagatatggayttgggattcattgtaattagatggcaagtgaaggtcctaggagaggaagcccagaatgtgtgagagcaaatgtctttgaccttgtcttcatggagaagtgtccatgaaccccttgaaatgatacacacaattttgtacataggtagaaatgtacatttttctatggaaagagtaagtccgtagctttcattgaattctctgaaagatcaaggacccaaaagagtttactgagaagaaggccaagagtttactgagaagaagtacacttggggtactccaactttacaggacaggcagagaaaaaaagactgaaaaggaacagtcagagaggtgggatgaagacgagcacactgtagtttacgccaaaacagttacatcattattgcagagccagcataagctacaggacaatttgatttagggataatacaaggagaaacaagttaggatggagacagaaaacagacaggacttgtcagaaacagtgttattaatgccttaaaaacagtaataacccctactacagcagtgacatgggaaatacaaataggtagaatatcctggattacaatttcccaaaggaaaactaggcatctgagagtttaagtgcattttgcatgggttgaccactgtctagcaccatattctcttctcttccaccaccaagagcccccagcttatgctaactctcatgacaaacacaattttagtacctctcactaccaactatccaggaaccaggaatcacctattactacrgttccagcagaatgggaatcccattctcggatatccagggtaaatccctgaccatgtgagaggaatcctagtgccccaacaacctcacccsctgactcctcctcaaaggctctgccaagtcaacaaaaaaatcctctacatttacactatctgtaaagccaaagaccagcgtcaacytaaatgtccatcaataagggaatggttggataagtaaaaattatgcagctgtaggaaggaatgaagaatgtctatatattcctccagattaatctctaagatattcagagaaaacaagcaagatggagaaaacatatatacttgttaccatttttcatggattcatatatacacacacatgtttacatttaaacaaaatggaaagacaaatcatattttttagtggttgcctatatgcagagtgaaggaatagtgtggaagaggtaagtagagagctacatttctttgaatataatgtttctttataaatttgattttagaaccaataaatattttacacagtcataaaacaaaatttaaatagcaatatgtccctaaaaaamacaaaagaaaaatgaggcaaatgaatttggttatgtatccaattggtagcataaccacacagagagaaactattccatctgactataaaacaattaatttgacaatacatccttagtaggacataccttaaggtcatacataaatgcagatctgcatatatatgtgtgtgtgtgtgtaatgttcagcaattatattattggtttaaatattggaatcaatattctgagactgctttatgtgcatcaaatgagtaattatgttggtattattgaagagcaagattttgtaacatggttgaaagaaaatagaaatgtaggccaatgaagttaagtcaaaagtcagtagttggttctaagtatgaactggatgcatcagtataaattcatggtgtagtgtatctttaaaacaagcaaaaaatattttctacctctgtccacagaaagtgctccaaaacaatgactaacagcaaaattagcacctctagcacccatattatgttctctaaagaccattgcccactaaaaggaattaggagtcctgggagaaataagtgattccaggtctggagcataaaatgtataartatatttacatattacaaagtaaggaagctatcaaatactattaggattatgtcaaaaggactcaggatccaacctgaatatgttaccactggtcaaagatgggacaattttacctataatggattataacaaataaaatatgtttaaaatcttaagttcataaacatattttttaaaaccttagtcaccttcagaagatgctagagaaacatcacactatatttttatttatttatttgaaataattttaaacttagagaaaagtgcagaaattatgcagagaattgtactcactgtgccctaatattaacatattatattactatagcagaattacgaaaatcagaaaattaccattggtgtaatactgttaactaatctacagactttattttaatttctccagttttcccacctatgtctctttttttttttttttttttttctgagacagagtctcactctgttgcccaaactggagtgcagtggtgccatctcggctcactgcagcctccttctcccgggctcaagcaattctcctgcctcagcgtcctgagtaactgggattacaggcatgtgccaccatgcctggctaatttttgtatttttagtagagacagggcttcaccaagttggccaggctgttctccagcgcctgacctcaggtaatccgcccgcctcagcctcccaaagtgctgggattacaggcgtgagccaccacgcccggcccccaacctatgtctctttaccagggatccaatccaagatccctcattgcatttaattgttgtgttttctcagtatccttcaatctgtgacagttcctcagtttctttgtctttcatgagcttgacactttcaaaaaatccaagccagtgattttgtaaatgtcactcaatttcagttggatcttttctcatgataagatccacatatgcatacattttttagcaagaataccactaaagtaatgttgtgcccttcttggcgcatcatatcgggggaaattgaggccagtacgtcttattacttgtaatgttatctgtgattatatagttaaggtagtgtctgccatttttttcactgtaaagttactgtttttccctttgtaatatactaataagtaatattgttggggagatacttggagattatctcctcaacaagagaaataggatatttgagattatgtaaatatcctacttctcatcatacttttgcccactaattttagcatcaattgacagttcgtccttataaccataactgtgaagtgtgcccaatgattatttcccctttccctctacatttactcattggaattctgctctaaggaagagcttaccttctcctctgtttacttatttattcaatttttatattagtatagatatttattttttctttaggttataacctaataatgtcattatttttttgctcaagttttcctagatttggtcattacgggttccttcaagttgcttcctgtgtcctctagacgcatgaaaatatcctttcattttttgaacacttccttactttctgacaccacataatcctccaggcttatctggcatattttgcatcccagccctggaatcagccatttctctaaggatccatggttctttttatgagagaatggtgtttagaaaccaattccttgatgccatgtgtcttcattgcttctgtgttgtcattgcttctaggccctcccagccaacacagctaggaaataaatgtatgtgtaggtacacatgcatacatctctacttatttctgtctattaatatatgtgtacacatatggctagatataatatgtataaactatatataacacattgtatgtaaaatcatgaattcatagtgatacccactattccaaaccaatgccttcaatctagccttcccccctttatttggttattctttttctgactttgagaaactagactctcattagtcacaatacacagtcattagttcaaatctagcatacgtagtttcagaattactaattcatatacctatgaaaakaaattaactagagtacagtatttgtggtgcagttatttctgtccttagctttacaacacacagtcaaaatactgttttccaaagttacttaggttattcttttcttcctcactcttcggtatagttacattatctatttacgttatactgtttatttgttactgtttttatttcattttagtttttccctacatcttggttgattttaagtatttatctatttgggaggtatgtaaaaccttatgatggttgtaagagtcaaagctatacaagaaagtattctcaaagaagtgttgtttctcccttatccctactatcccattttcattttcccatttttctctaccccattctcccagacccgtgtaggtaaccagtctcattagcatcctgtttattcttcttatatttcttttacacaagtgagcaaatgcatgtaggttttcttatgtctcttttttcttacaataaggtcagcatactatagatattctattttactttgcttttttacttaatatattctggaaatcactccaaatcaattcatagacatctgccttattcttttttacagctgtatagtactccactgtatggctgtgccattgtttattcaacaactactcttccatatatggatatttaggttgtttccaatattctgtagtaatgaacaatgctaccacaaataaccttatgcattccatcatgttgcaggtatatcttcaaggtagattcctgtaggtgagaatgcttagtcaaaagttaagtgcatattagctctgttaggtattgtcaaatttccctccccagggttgtactaatttgtattcccaccaacaatgtatgaaggcaccatttttcccatagcttcatcaacaggatatattgtcatacttttcaacttttgcccatctgataagtaagaaatgatatctcagctttgagtttctttgtgagtgcatttgaacttttttttttttttgcatctttaagggtcatttttatatcttttgtgggttgtctttcatgtatttttctcatttcctatcaggtttctggtcctttgtcctcaatttttaacactyctttttatatagggaattagcccttaaactgtggtacatgctgccaaaatttcctcccagtttgtcagttgtcttttgactttatcatgtttttgactatgcaaaatgtttatgtagtcagatataccaacattttatttaattgcttctggattttgagtcacagtttgaaaaccttttcctgtatttagattaaagaggaatttacttgtgctttcttctagtactagcgtggttttactttgtacatttagatccccaatgtatttggtgattatttttatgtatggtgtaagatataaatctaattttgtcttttctcaaatggctaccccattgtcccagcaccattcatttaaaagtctgtctctgacccagtaattttagatgtgacccttaccctatactgtatttccatatgtagttggatctatttatgggctttctattctatctcagctggtctatttctctcctcatgcatcagtgccacactgttttatctatagaggctttacagtatgttttaatatctggtagggctagtttccatcacagtttgtttatcagtattttcttgcctatttttgcatgtttgtttcttcatatgaacttaagtatcgatttgtctaactccataaaaaaagtttgttgatatttttattggacctgagataaatttataaattaactcaggaagaactgacatctttataatgtcaagtcattctatccaagatcataggatgcctttcaatttgttctttgtgtttttgaaaagtgtttaaaagttttgtttatataggttttgcacatttgttgttaaatatatccctaagtatttcttctttgttgctattataaatggaattatgttctctaactggttattgtttgtatatgagaaggctgttaattatgtgtgttagttttataatctgttaccttttatgtttgagttagcttatcattgattctctaaggttttccagatatactatcatataatacaaaaatagagttttattactttgttatccattcttacatctctaattaaattctcctgtctaattgcattaggtaatgtctctagaatagtgtcgaatcatagttatagagatagtgagcatcctcccctggttcctaatcttagtggaattgtgcctagtgttttcctcattaaataagatactggctttagttctaaggtacaaatactttatcatgttaagaagatatcccacaatcactatttttartgtttttatcataaatagatattttaaccacactgtttttttaaaactgacaaagggaaagaatcaagcatttttttcctgccatttctatatgatctacacctgaaggtaaccaaatgaaagattgggcaagtttatcttcctggaattactccagcaataaacaaaaaagaaattatccaataagaatatcactattttgcaacccctaacaaaatagtcaatccagtcaaaggtcatcaatagatgctacctttacaaaaagagaaacatcaggcattatacatcctgatgaaagtgtacaccaccatctatgaagtagtcttgccaaaagagagagagagagagagagatggagacagagttggtgagaggagagagagagataaagacagacacagaaaaagagacagacaatctgaatcaagcctctagccctaacaattgacaagaaattcaagagacagaggaaaatgtcagacagcacagagrtatactcagtcaaatacagtcatgagaacttgaacaaatgatctgatttcttcaacaaagaatttaagggaggaagaaagagaataagatggagggaaaagtctatgtgttatttaaagaagctatatgtawgtttatatgcacctacagatatttaaataaacttcaaagacatatcaactaattgcaatgtatgggccttatttgaatcccaattcaaataaacaggctgtaatagaaacatttatgagacaactgaggaaatatgagacgactggatgtttgattgtactaaggaattattgattttttagctatgtaatattttggttatttaggtataaaagtaagtccttatccttttgagatacatatgaagtagttacaggtaaaaatgatattatgacggagactatggagagggaggtcatggtatttatgaaataagattggacgtgtactgatctttgtcgaagctggtgatggtttacatcaattctattattctctctgcctttgtatatgtttgaaattgcccataataaaaaatgttcttgaaaattttgcacttattatatttaacatttagaccaaatgagatcatatactgtggaatgtggtggaaacaatcaaatacatccctgccataagcagtgttgaccactgtcagtctctgagccctcaagggctaatggccaggttgctcccaagtgccagggtaacaggccccaggggcctagtgacaagagtccttccttcctcttcacccctcaaaggaccccagctctgtggatttctccctcccacagggaaagccccaaactcacatcattctctgaggtcccacagaggatacaggatttgcactctatgcactgccacttgtaggtcttgacagcctcggtcatgttcagggtaaactgcaggcaggttgggtgacctggaggaagccagaaacaacagcattagggccraagtatgaactgccacccctcaacaccactcactggaaacacattgatgcccagtgtgcaggcagggcagggtagcatgacgtagggaaaaaaatggggacccaaacagggccctacccacattcttcaccacccmgttattcagatcaagggcaaaacagagatataagcacatccaattctgcttgcactragaccatattccccagcaggtgtaaccagttgatgaagatggaaaacaatgatcagagagaacgagagaggaaactgcagagtacacagcctggggcagcactatgagagacaccagtgggaccctccaagccccagcatcagctatggcagcacaacaggtaagaactatttggagctgggccttctgatccaaccagttattcacactgccttagggtgcaagggaggctatcagaaggattgtatgaggtttccagggtcagtgctcagggataggatgaggcattgcactgttacctaaagtatccatgcccacactcatgagactagcaaaagttcatawcctgaacagtaccacggactacagaaggaagtggcctggcarggatggcaaagaaatggagcatcagagcaaatggccaggtctatcctaaaaggactggttcccggttctaactcttttctccatcccaagtttcatgggagccaacccaatcacaagatgagagaagggacattaagctgtgaccttcaagcacagcccccgtgagccatgcccaagacttggcctgtggaactggactctgtcctcagacctaggtcacctaaaagagagatgcttgcagggagaggacggccatgaactgtagaatgcaaagacccttggccttctatgtggcatggaaggataacttggatgacattcccaagtckcccagtactgtgaaacagatcagaatctgcccagarcacccagggcaaagccaattactgactctgtcacaaaaaacattgacagctttgcccagtgccgagcactcaccgttctccagagcttccagttctgccaaacccattatatggtgccttgtgttgcctctttcatttgaaggattatatgctttaaagaaggatgctagagacaggggacaccaatcatggttagcaccgccaacctagtatcctccacagacaggatcccccatggcgccaccaccccttggcaaagccacatcttaacaggagcccccatttcctccctttcaaatcttcagagagctgttcacatcatgaccatttggatgaaatactgtctattcagccaacataaggatccttcacattttgagctccacaaatagaaaccatgctgagttatcttggagagggcgaggggtgtagaaatgacttgttggtggtggggaggggacactcagtgaatacaggcagaagcagcaaggagaggcctgatctaaaagcttttcaaggacttctcaggtaccatccaacttagagacttccgcagctctgaactaataaccctctcaaggtgataccatsacagtggccccaaagaaaaagaagccttacattaaaagcctgtgtgaacagccagctgatattcttgaaagcatctcaaagattggtctaagaagaacattagccagggttactccctattccagtctctcagagagaacactgggatgggtacagggtaggaaatatctgtttgggactccatgtggtatgaccacagatgcccagtttctctgaccaggcaccactgagagcatgaacatgaggtcatggagctgatgctcatataggcaagttgactttggccagttctgtgccacaccccagccacacccagccagcttaggataactattcattaacttacsaagtacttattgagcacctacaaggcaggccattgtgctagacagaaaagacacagtggggatgagcaagataccttgagcccttccagcctagccaaagaggcctcagattaatcagctacacatgtatctatcaactacaattgtataattagtgccatgaaggaaaagcataattggccgtaaaaacacatagaagaacctaacctagactgagatgacaaggaaaccttccctgagaaagatctttaagctgatatgtgtcagatgagacgttagctaggtgggaagaggaggattccaagtaaggggaacagcatgggtggaggctttgagcagtgaagcagcttagcaaattacaaggaagagaaaggccagtgagcagaggcttgatgagcaaaaggaaaggggtaagaggtagctgcagaggtagctggagaaggattacaggcatttgcagcccttatttaagaatctgttttttaagtcattaaaggctattaagcaaggcagtaagtgggtcacattttgtttttaaaggagcactctttagcatgagtgctattgggatgaagtggttctgtatcttgattgtggtggttacatatgtgataagattgcatagaactgtacatacacatacacatatgtatttgtacatgtaaaactagtcacatctgaataaagtytatgattgcattaatatcaattgcctggttttgatattgtgctataattacataagatgttgcccttggagaaaactgagtgacgagctcaaggactttttgtaatatattttgtaacttcctatgaagctataattatgtcaaaataaatagttgaaaatatatttttaaataaggaaaacaaataaaaaattaaatcatcaaaaagaaaggaaggtggaaggcagataagaaaaaggagagagagaggaaggagggaaggaagaaaggaaggaaggaaggaaagaagcaggaggaagggagggaaggagggagggaaggaaagaaggaaggaaggagaagggaagagatgaaagggacagaagggaaggaagggaaggaagggaaagaagggaaggagggaaggatggagggaggggaaggggagagaagaggggaaggggatgggaaggagagaggaagaggaggggaagggaggggaaggggaggggaaagggagaggggagggggaaggacaagagaaggggaggggaagggaggaaggaaggatgaaggggctgtacgctaaggaaagaattgttgaggggtgggagggtacagsaatgtaagaattgttgccaggaagctagttaggaggctaatgcagctaccaggagagatacaagaatgattcaactaaggtggaaatttgagaaatgttaaagaaatacttgacaggacttgactattgtttgaatgttgggaatatgggaaaatgatgagaaataatcccaagttctgacccatgaaactaggtagattgtagattacagtgaaacttagatgagaaagactgtagaaggattgcagggaccacatagaggaagaggattccttctgtgttgagcatgctgaaactgagaattctggtggaaatgttgagtggatagttgaatgtatgggtcgaaattcagaagtttttgctaaataggtgataagtgaaaccatgagaattaatgaaattatctagggaaaagggaatgaggaagtatctagggaaagaaaggaagaggagagaagaaaggagaatagagaaaagggtctaggactgagcttggaggagctcaagtcctccaagatcaaaagaaagaaccagcaaaggaaagagagaaacatggcaagaggtaagaagcaaatcgggtgagtatggggtcacagtaaccaaaagaagaggtttcaagaaggagaaggtggtcaactgtgtttactgccacaggttctctagtttgtccttgctcaataaagaccccgagtgagggaatgttgacagatcagggcaaaagctaccctactaataataacacgcttcagtcatgccatcttcccaaggaaggaaagtcagcacattccagagcatgacagaactcagcagccaaatgtgcatctgagctgtctctgtgaggaggggccgggggtggcgtgtgctgcatgcatgtagcaacactccaccaatatttatcgagagccagctctgtgtcttagttctctaagactcctgtgctgagctatgaagacattttctgggatagctttggacaatggatggtagcaagtgggttttggaaatgcctgttggaagtttctgaaacaatctcatggctttctctgtgttcccatcttgagaaagtcatcagcctcctgaagatcttcaaacccgaagcaagggagctaagttcacacagcctcaagcccccgayaaaatgcaggactaagatgggccttagcagtggctgcaggaactccttctcctccacactcaggacatcactcaagcgcaagaagaaagtaggggagggaaatactattgtaacttctcagccagggagggtgagacacaaaaagtttaagtcatcagcaggtgcaaaaactgtgcccagaactaaatcctcctgtctggaccaccataacagatttgctcctgcgcctttctccaaaaactgcagaaatcatttgccagacaaaactgcaagaatgagacttcttacctgccacaaaaattacttcaataatacacactgttagacaaaargaagtgtctaaggaaagtaatagcagcttgtttctaaggttcactggtcttacttttgcccagaactaattcctaaatgctttgaaagtaagagaataacaaatacggtctttccaattcaaaggtgaaagaaaaaaagaggcacatggctataaggtaatttgtaatacttatggtcacttgatatttgaggatccctatcttaatctcttttgtaaagttaaccctcattctctagggtattaggctggtgcaaaagtaattgcagttgttgccattaatggcaagtactgcaattacttttgcaccaacctaatacttgcttggaaatctagattttttcatagccccagttttctttagagcaagaaatacccatattgctatttaaatagcctactatagtggagggaagacaacccttcccaggcccccctgggtgccatgattcaacagagcatttataagattccaattaccaaaatgaatttagaaaatggtgcactgtgcatgattcagcccagccggatcattaaaaacctagtccttcccggatgttcctctaaatgtattctatcaggagcattcagtaaatctcctgctagcttrttgagctgggtcagtggtgaacttggtgtgaagagccattcctgattcagccctaacccttccagaactgacctcaatcctccctagaggttgacactgggtatgtcacccatggccactatgtatgggagatctaactgctggagtgggcttttgggagatcagcatttggcttcagggtgctatttcagcagatggagggaaagggaaaccaatgggttatgggaaacttctcagacagatgataatccatgaggctgggagtacccggtgtttctgacactacagcctactgagctcagtaaaaaaggaaaggcaggcatctgagagcagtgacagcagccttggcactggaaggacacatctcatgtctttacagaaacatgtgcacagatgctgaaaatgttcaagggacagcaaatgggatttgtggtatttgagtgagaaggcacacagataaatayccaggcaaaactagtgttagtttcatattcacagctgccaatttctatgcacgmtaatacacaactgccccaacacaagggtatttccagccttttaggggagaaaatatctaaatataccttgtggattaagctgacattatgattgcaacttaaaagctaacctaagtcacttactagtcaacctcctctatagatattcagtacattgagagaaacacagttcattttcaacaaaccctgggcaaaagaaatacacaaactgctatgacatgtgtctcttacattatgatccttattaaaagagtttttattttattatcaccggtatttaatttggactaggctaagccacatcactgattgaattagggctccaggaaaaaaaattatcttcctaggtatgcaytgaaaacataaataaaacaaatataaataactttggaatcagcatggtctattatttattcattgtgaaattataaacatctaattatactttattaccttatttatcaatgttgatctcttaaaagctaatttctcaggcaaagagaacttaaatatccatggttctcaggcaagtaaatgcaaaactcaaattgtgctccttattctgatgcttggtttacagaaattgtattacataaaatacatagaatcaattccaacccaaaatagcgccaaaaacaagtctccatgggcattcattagaaaataatttggctcaaatttcaaatagttctctatattctcatacacatataaaattcctggtatttacaaattgcaaatgtatatatgaagttttagctaaagcatttatgcaaagtatagtcatatctgaatcatcatgctacagggtaatttgagaagaaaaattattactagttctctttgggaagccatctcattcaatcagatccattcattttcattctctcactcctctcttctctctttctcttctctccctcttctgtctctctctctgccccattccctccccctctcttcatgctcctccactttgagacccagcttggcaggtggagagaaggaggctcagtcattatattgaatctgtaaaggggaaagggatggaccaattctgagcaatcaaaagttcaactcctttatgtatatactatggcaagtatgataactgggcactgctgcttcacataattatttctcaagccctgctttgtaaaccttctgcaaaggtctgcaggttcacctctatctgcccccagatgttacttctaatgctgaagacacctgcaaatcgatgatcacaatggcactccagaggcatctgaatggctccctttttctctcaccatttttattgcacttcaaagaggacaaagaagagaaagagaatggaaaggacaaataccaaacaaacaaaaatgcattaaaaataaatgatagcgtgagctgtgtggctgccctttcttgggcaaaacaccttcctgtgcatccagctccactcctcttagaggtttgtttatcctctcctccagttgtcaaggtctgtggcacccaggaaacacatgggatgcaagccccaggggctattgcaccagtcattcttataaataaccatacaaagcacattcatgcaagagtattacgggcacttttaataggctaaacagccaagggctcatggcgccattctcaaatggtcctagaaattccccaagttttcgtggtcaggtgtggtccaaggtggagtctctaggaagtggatctacacctgtctataagcctgagggcatacatcatggttggtcttcttaaagtgaaataatgggatagggaagccttgacctggatttatacaatttactcgactcaacttggggccaatgcacagcactaggaatacgttgagagtcatagtaatgaccccaaagcccctaattagtcactgcagctgaggatcaaaaataatttattcatttattcattcctttgacagtatttgttgaatatataaatatggcaggcactcttccaggtactggggatatagcagtgagaaaatccaaacccctgccctcaatttacaactgccacactttgagatatattacagcacctgagtcctttggacaagtcaattgacttctctagcattagtttttcaatatattaagttaaagcattggaatctgctatccatgaagctgtagctttgtctatgccacccaaaaatggtatttttaaagatactactgatccccaattgcccatctgcttggtgggataaacaagccttctaaagtttgccagctaaaactgaaagttaaaaaagaaaaaaactaagaaagaaattaaaatagccagtaagtccttctagaattcatgtcaactttcccatattgaccagcccagtccgatccaatgtcgacacaacaaaagatggccaagacagaaagcaaaagaaatctagaaatctaaaggacttttcatcaaccataccacccaccgccatgcaataagttaggcctatacagatgagctgtcataaactgaaggtagacagaggccttgggtaaggttccatcgatgaggaatattagatctgggatgagctaggttgagctgctgtgtgacagctgcagatattgccaggcaggaagtgactaagagaagagggtcatcggtatgagcaactctggatgactttccttttaaatgcttctctggatttgtagattgcaggcaaccagctgcccaaagtgattcttgccccacaacagtgtgtgaaggtcaggcngctgaatcattgyccagagcccaacatcaattttagatgccaagccttgacatttgctgtgcattccaggcctctctggacctcaggagcatccaaccatgggacctggctaaaggctctgtgttttctttaggaaaatgagcctgaaaaagaaaccattgcttagattggaaaccctgtaatccctgtacttcctactgtcctgagtacatccaggagaatttcaaaatgnntgtaattgatgtatagctggtggaaaacagcagtgattggtcaacacttgattgcccatgatcctccaactgctgatcatccatgaattagaagatgaattcatgagtggtctaagttcttgagttgcctgaggacctttgaagtagcattctaattttttcttccaaaaaatattccacagagttgtgctaagtcaaaaggaaaaaatgctttcctatccttttctacgtgagcctgggaagcaatcatagaagtacctagaagtagaggactgacagtgtactcatgacacttagacactttgttttacatttttttttttttttgagacggagtcttgatctgtcgtccatgctggagtgcagtggcgtgatcttggctcactgcgagctctgcctcctggattgacgccattctcctgcctcagcctcctgagtagctgggactacaggcgcccgccaccaygcctggctaattttttgtattttttagtagagacggggtttcaccgtgttagccaggatggtctcgatctcctaaccttgcgatctgcctgccttggcctcccaaagtgctgggattacaggcatgagccagtgcgccatttttaaatcattttagtctaattttgagtgttcttgtggactttgcaatctacccaattgtgatcagattctcatagaaaaataattccacttaatttggcaaaattcactgagcacctgttcattgccaggaactgtacaaggtgctgaagtttcaaagaggaatgaggcatgactcctgccttgaggagctcagtttggtaggtgtgctaggcagtctctggcgtggctatcaatgaaggacaccatactcttttgtcattctccccccttgagtgtgggctgcactaaatgactcacctcaaactagtagaatatggcagaagtgatgagatgtcacttataatattaggttataaaaagactgcaactttcatcttccgaatcctctcttatgctttctcacttacttgctctaagggaagccagctgctatattgtgagatgccctacagacaggtccatgtggcaacatatgaaggaaggcctcagtgcagcagcccaaggggaactgaatcctgccagaacccacacgtgtgggcttggaattgaattatctcccaagtgagccttcagatgagaccacagccccagctgacaacttgactgcaacccaagggaggccttgggccagaggcacccagataaaacacacatagattcctgacccacagaaactatgagataataagtgtttgttgttttaagctgttgagttttggagtaatttcttacacagataactattatatatagagagagagactcttttaaatgactataatacaatgtgataagtgccataataggagaatgaatgaagttcctacagataaggaagcaataaataatgctggagaggctcagggaaagccactgagaggaggtagctttcaagctgggccttaaaggataaataggagttttytaagtaaaaaaaaaaaaaaaaaaaaaaaaaaaaaaaaaatggaaacagcattacagggaaaggcaacagcaggaaatataaggtgcatggtccactcaggcaaagcagagtagctcaaggagagcagggaaaagaggaattgcaggagatgatgctagaarggtatgaggaaagattatgaagagcctcttatgtaggcatgaggatctgaatttaattctgtaaacagtggggactcctcggaggtttttaagcaagaaactgatgtgcttgtacccatgctttagagagatgagtctggtgataggtcagaaggcagatrtgttggagatggctggggaagggggaccagtcactaaatccatctattcaatgagtttgtattgagcacttgcaatgtgccaggtgctgtgatagatgctgagcaatggaaaacagacaaaatcctacccttctggagcttacactgtaatgaggggcattagtccagggcagatctaataattgtggggatgaaaggaggaaacatttgagaggtagaattggtcaataggacgtgatacctgcttgaatatgtgtgtgaggaagaggcagaagtaaaaaatggcatcaagattcctaggttgggccacagagtagatgataaaactgttagcagagatgcgacttgcagagtataacaatggattcaaactgggcacattccattaattgtgcagatgaagatgcccaggaattggtgtgaaaatgtgggtctacattcaggagacaagaccaggctagagatataaatttagaaatcatcaggtttgggtggtagatgaagccttggaagttggtgagacattcaggaagagaccacagagcacaaaataaaaaggacctagttaggggtagagggaagagtaaccattggagttgaaagcgttaaagagcaccaagaagagagtccactgagaaagctggagacaatgtggtcagaaagggagaagtatctggagagaggcacctcatgacatccraggaagaggaagggtggcaccaccatcaagtgacagatgaagtaagataagaaacaaagagaacgtgttgccctgggtgagccattggtgatgagaactaacacagtcactagtagcaatgggccctcatgcctctccaaatcactgatggcttcagcagcgcagagagaagaactcatacacagatggcctcacaacatgcttcttctgccgcaggctttgtccagcactctcaagcttggaagcaccgtgcacaatgatctcaggaacattgtctttacctaactccattcactcatagcaggaatcattttctgatgtagattctggggccaaagctaggccctgccagcctcagtttctgtccttcccccggcgatgaatcaaatcccactggaagccgtgcctttctttctgaccttggatcgaagatcttcagtcctaggtgactgagccttgcccacaaggctggggcaggtcctgatggaggcttctcccacagccccagagtctgatcaagtggcagtgatgaaaattctccaggagggaagttggggccaaaggtaggaggagcagcactgggagccaaacggaatggtgaggtgaggacagaaatggtggcaggcagcaatgttggtggctgcagtgctttgcaaaaatgcccacaaattccttggtcctcctcttttcaagaagtggaggctattcccctcttcttgaatgtagactgggtttaatgacttgcttttaacaaacacagtaaagaggagtgacaatatgcagttttggagactaagttataaaaggcactgtggtttctgtcttgactgtgcactctgtctctatgtctctgtctgtctccgatcactcactctggaggaagccagctattgtgttgtgagctgcctcatggaaaggcccacatggcaaggagctgagggaagcctctgttcagccagcaaagaactgagactctcaacgcagcagctcatgaggacctgaggcctaatggcaacatgagagtgagcttggaagtgactccttcagccctgatggagctttgagatgcctgcagccttggccaacatctggactgcagcctcatgggacaccctgtgacacaccacccacccaagccattcccaggttcccaaccctcagaagctatgagataataaatgtttgcagttttaagctgccaagttgggggataatttgttacacagcaatagctaactaatacaatggcaaaggaggaacagtaaggggcctggctgaacaccagacatttgacagaactcctgcttaggcagtgtctgcattgtgctcccagccacagtgaggcccagcactgggctggacaatgaaggagaggagcagggtttgggattttagatcatttatctcttccatgctgttattattttttttcagtgaatctcctttaaaagagctaatagtgggaacaaagataatttcagtggcaatatgaatgggtgtgacccctcagcatttacagcaaggtgagtgcatctgccttcggtttcctgggtccaacttgtttccatggcatggcccgaggagactcactgcaccaaagagcctgccgtcttcccctcaggccttgccctccatgcccctgtctcactctcaccctgctctgccttccttccacctgcctgagcctctctcacctccaacaagcctcccctttaggttccccagaacacaaccccagtgttagaaagtcagaggcttcctagaagtaagccaaactgatatgagcagaggaagaacctgcagctagtattctggcctaaagaaagccatgtttggatactttaatgatccttataacttttccaaggaagcacctttctattgactgattttgttttgattccccgtggggatcctgtgaggtgggcagaacagataggaacattcctgatttacaaatgaagaagttgaggctcagaatggctcaggcagcccgcaagtaagtagtggagccagggctagtggaacatccatgtcttcacattctaatcctttggtctctcactacaccatgtcctaggatggccaacccaaaagtggcaacccaatggcatttcagctccttgtttaagctgctaaatatagcaacattttctccttgcatgcataagaagtttgccagggcatgatgaaatatgtcactgactctctccatgcctcagtttcctccatttgcaccacataagggtgaactagctgtcccctcaggcccctttaagcctcaatgctccatgcctctagcgaaatccctcaagaagccagacttgcttacatgaggcagaggactgagtcctcaccatctggcagtgactaatcctggaaaaccctggggaagaattgctcaggagtgagccagtccagcccacacaaaggggcctggaggctgcaggaagtaggtcagcagcctatggtggtgttactgggcttcggctcctgacagaagctcctcagcccctggctggagtgaggaggggtcatgccccccgccacctcacagtcccactcagacttgccaggccagctattcccacttgcagctgggtgtccaggtcctccctagggctcccccaagtgaccgcccatcaccagctttccctgtgaagcctctgagaggagcacaaaagacggctggcatccaaagccaatttcacrccacacctccattacactgtcagtcaagaaaggacagaagtgttccccactcaccttgtctaagaaaggaacaaaagagcacacaggaaggatcccctttttgtcatcacaagactataytacaatsgagacacccacaaccccacccccactggagaccccaacgaagsctcactggctcctttcaatccttttccccctttcattctccacctcccgatttccccaagtcatgaattcactttccaagttgcagtggcaggagaatggaaaatgaggatgatgatggtgacaaccagctttccctgaagtctctcacccaggtgtcttgagccctggagacacctgatgtccttcaacaccctcaaaaagaagaaacagcaattgcactgagccaacactgcatacgggagaaacatccttggagctccatgggagtacaacaaaacccggcaccatctggcgtcgtattacctctgcatgcatttgcttccaagccccaacatccaggcagcaccgggtctgcactcctcctgtatctgtgatcactaaacccaactgatagatctgtttccatcggccaaattttcatctaagattcatccacttttcctgacaatcaaacaaatatttatccaacaaattcctgaatgagaattgatctcgctgcttacttagaaagctagaggggatgatttttacatgggctttctttttttcctctggagaaattagagagttggaatagtacaagagaaagcaaatcaatggctatttccagtgaccagcatctgtcttcaggtttaatagaaatgatgccctaagacatatagtctatttggcctattcaatacaaaaacacccatcaatattaaagtagtgcagcaggagggcctttcctggtactttgtaagggtagacaagagcctcacaagtgttcaaagattcacgaggcccttctggataagcagtgacaaactccattccataatcagagaaatgaaaccatcaaccatctctaaaatggctctggttcacctgagcattaggtgtgagagaattaggaatacatcaccagaaatctgacctcctttcagggatagctaaatatgtggcacrtataccaccattctatcccatacccagggcagacattactaatcaattcaacattgtcttccaatctgcatggataagaccttatgatccttttcagcacmgcactccaagtggctgtcactggtctagagtttgcatacaagaagaaaccaacttgccatccctgagctaggcactattaagctgaataggttaaaagtttcatgtgagaattaaggactcacatcttaagcaggtcactggtcagatatataacttctgttttcctttccatgaggcagaaactctatcacaacagctaagacccaaaccaaatggtggccatgttttgtggttggactcaagtattgctacggtcacatacttctgtcttcaaagcaaacagagatgctaagaagggattttttnttttttttcagagatagggtttcactctgtcacccaggstagactagagtgcagtggtgcaatcttggttcactgcacctgccgcctccttggctcaagcaatccttcctcctcagcatccacgtccccctacctgcctcccccagtagctgggactacaggyatgtgccaccatgcctggctaatttttaaattttatatagmgatggggtctccctatgctgcccaagctggtaagaagggattttttaatgatggykaatattttttctactccaccagctagaaggcatcaacccattcctccttaagtaattcctctgtctttcattgcctgcagcatgaagtaagcttcttagcattgcaagcctctttgctgtctggccacagctgcctttttaagattyctcttcttttcccaccatggaccccarccccaccataccacagaaaagtatttgccrcatcccacaccctcaacgctcctacaccccccaccccccaaaaaaccactcttctttttgacttgcacttttgcacacaaaggtctctcactatctctcaactcccattcatggccaaacctntcaaacaggttgtctacactccggctacacaaaagtgggcccatcgaccacttgcatgagcatcccctgggggctggttagaaatgckcaccccggatctgacctagggactgcagttttaacaagatccccaggtgattcgcatgcacaggrtattttgagatgcacttctctaaactcactccctttctgggacacccactcagtcttcactctctccacactgacttccctcctctcttttccaccaaaaaaactctcatcaaaggagtgaatgtgtccatgcagatatgaataaaagaataataaactactacttccaccttttgcctgtcctgggaacttctattcatcctccaagtccagtccaaaagacctcacttctgtgatgccttctctaccctctaacgcagataaggaaaccaaagtcctgggaggatgggawatctgcttacagctctgcagcyactaagtggagwccacctgactccaagcccatgagtgccctcagcatcgccagtgcactgcctttacgaagtgcatccagaaagatgcccacaacctcagataaaagccctttggccactgtcagggacaggactccaaggctggaaccagtaaaacaagtctgactttgctggtggatgagaccccatggaggctgctcataaatcagattcccttgtttaagttcttagcccctgatgactactgcttacccaggcctctcaatctccctgaagacctttctccayccccttccttcaaacacacatcccaggcacccatctcttttgccctccttgcctccatgcggaatttttcctttggagaacaaggacctcagagtggaaatgtccatcactggtcttctcatttctccaagccacagcaatgccattttggcgacccggctgctctcaaacttcagagttcagaagaattaccgggagagatgttttaaacatgcagattctcaggccccaaagcttctaattcccctgccctggagtgggtaggaatctgcctgtttagctagtgccctgagggggctcagatgcagatggccctggacacacttggagaccctctgctgccagcgtctcctggggactcttgcacatcagcaagctgctctataatgcagcgtgtggaacctcagccaagtcttcccaccactctcatcctgagtcagccttgctcaatgagggctcgaaagcctttcctgcccacctcatccttcttctattatgaggatcaagaccatgggctatgtactactgctttgttaagctggaaaactttaaaagaacaaaaggccaaggtttaccactcttctgctttgttttggcaccactaaacctctacgcccattcccagaaattctgtatttctttcaaccccatagcccattgtcgacatacccgtaagtgtttcagacaggcctgtgattgttgcatgcaaaggacatcaatccatactggcctgtatccaggcacaagctgtcttcccgatagcaattctccttgccagagacctgtgggtctcctgcataaacaggaggtcttagcttctctcagcaacttgagacaggcaccatatactctctccccaagataagatcttttagaagacaaagcatttagattatttcctttgtaggattaaaaacaaacacaaatgcccattccagtatttgtaggactgattcaactggagtagtaggaaagatttaggatacatttaagacacggtttccattgtttcactatgaagctttgagtatctttgcaacctaattagattgcacctattaaatgatgactggattcaacagcccyagaacaagcattacttttgatcattttctattttagcktctattcaactattttaagaggaatatacctgagccaaaaatcacgaggaggtggctagcagtagcaagattggtcctaatttattgagggcagtgaggcagacaccaycaattctttaatctcgccaggagctccagtccayggacagtaccacttctcaccatatctcctctcacgtcgtcactgctcatgcacctatcttagattccacatccagccttgcacgtgtctgcctacccctctacccctttttcctacttactcaacttccagttaataccaactcttcacctactcttggcctataccaagcacagaaaaatacaccactgtgctgagcagtcgtggtttcagtggtgaccacagatcttgtcattgtccccgtatttcactagtcgaattattctcccatctctctctgtcttttcaaatctcccatatcttataccccatcctcacactctccttatttagttgaaaaatacataaacaatcagaataaaactattgcgccaggcgtggaggctcacgcctctaatcccagcattttgagaggtcgaggcaggcagatcacttgaggtcaggagttcgagaccagcttggccaacatggtgaaaccccatctccactaaaaatacaaaattagccaggtgtggttgtgcatgcctgtaatcccagctactcgggaggctgaggtgggaggattgcttgaaaccaggaggcagaggttgcagtgagctgagatcatgccactgcacactccagcctgggtgacagagtgagactctgtctcaaaaaagaaaaaaaaaaaaaaaaaagaataaaacgatcgcatcttctccatgccacacccacccagctccccgcctctgtatccctacgcttgtctccctcctattaccgggaatgaacggtctcagctcctaacccaaagccgactggcaccaggatccctacctctcaccctgagaattttgctcctgctgttattccctcttgcatcgtcaatgtctctctctctctctagyagaccattcagccagcatacaaacaagccataaaagctcccatcttccaaagagatccttcctgaccaagcatccccctctgttgagcgtccaatttctctgctccttcttcttttagcacaactggaaagggccagttctctccatgcccctcctttccacactctcccctctccacacactcgcctagctctcctcccacctcgctggctgccccttcttggtcttctttgctgaatcctcctcttctccctttctcccagttcttccttttatgtggactcacttcccctcaatgtcttctatmcacttgttattcccaatttatatctccagcatgaacctctttctgaattccagactcatatatccacttgtcatggtggttgggaacccgaagaataraaagttaaaaagacctaagttaggaaaggattttgtgggaaaatcctcatcccaaggggtgatgagtaccctgccagccaggaggggagccttcagctggggggctgtggagtctttatggaggcaggaggtggaactcacagcaagcagaaaattagttgaatggcaccagctttaggaactgccaggatgcactttggatcatgaataagtaaagaaaagaggtcatcacaggttccagaagagtgaggacagagagaagcaacaaagtgagaaraggaagaaggaaggagacaaagaagacaggatacagagaagaagggggctggaaggagtgggtgaaagaataagaactcagaaaagagattttggttcttgcttattcaggagcttaaccagaattctgtctaaactctttaaaagatgcagaaactcaattgtctcactcatccctgggtngggggggggattaatgtattagtactattgctacaactttatgaggcgcttcctatgtgctaggcactttgaacacacttccttatttacctcttaaaacaatctgtgactcaggtattattgtctccattttatagacaaagaagctgaagctcagaacagctaagtaatttactcaagacaacccagccaactgctggcagagacaggatgaaaacacgtatcttattccaaccaacatccatgcaagtarccactacaccgctcggccacaggaaacaagcactgggaaagacccttcccctgacacaggaggccgagcggctgatgagcaaactccagagagcactgggctctgaccatccggtggcctcccctgccagagggctggggcaatagacacatccccacctgtgctaaagtcctgctttcctctccacaaccctcccgccccatccacactccacactgcccttgagggaaaaatgaggacccagaggatggcctggggatgaggggggactgctcattagctacccagccgtggtagctaatctaagatccgggaataaaggccctccctgaatgaccccagggcaaaaccaggtcaaggccacttccaaaccccrccccgacagagttaaaggcgaggatctagaaaggctgaaaacacaaagaagttaatcagctccctgaaatgaaaggggagaaaagagactggataaagggatcagctgaaggaagcagcctggcttgggagagaacactccactcagccacgagtccacagactcaggccagcactgccccgggggccaggagatcttggcratggctctctgctgtctgtttccttctctgttagacaagctctagggtctttgcacctgacagctgaggatagggcagcacctgtggccaacacagcctcatctggagtgggtccagccaatgctgtgaccagcggctctctgtaggtgcacaccccataggtaccctggatccacacagatgccccctctaattccatgctgcctctccatctgcctcttcaaggtaaaaggtggatggagctagggggtcagaaggagtcacagggatgggtgagctaagaggacaaaggaggcgtctccctccaagacaggatcagcgtgtgtgggtgggaggtatacaaaacgccatctctcctccacagacacccgggaacactgcctgaaacttccaccactgatgtcgctccagtggcttaaaaaccacccttccaaaaatccccagttaaaatgcaaacaactttcttaaagaggatagcactatcatgggttcctcacttgatcaactcagacactgtcagaaccagagtgaatcttggagaccaccaagtccaaccccttctttagacacagaaggaaaccaagcctctaagaggtaaagtgacttgctcagggtacaggaagaggtggcgcagagctagaactgtaaccaggtctcctaagtctttctgcagcatggccctggcccctgagggaggtggcccaggatgggggcgggcagggggtctggaatcttggcatcgtgctccggggctgctccttcttcctgttcagccaccacrgcaaacaagagcccctggggcctcagccagcgactgacccctccctgaccctgccttccggaaggatgaatgcacatcagaagccagggccaaaatattcctgggcactgtctgctgtgcacccagctctctttttcccagcctcttaggagggagaagtttccaaaagggacagctccaaaggctttcacagaaggggagcctctctaagaagtgctcctgtgtttgggcaatggaggyaagtcaggaagacagggggatggaagaagaaagtaattttttgaatgtcacattttcaccaaaatggcatctgggaactttcaagatcatctgactaataccaggttgtattcgttatttgcaaagatggaggtggaatctcctttgaagtagtacaaccaaatgatgtctgtagccttmaaatggggtaacaagaggcaaagaaatctggggagaggaaacgtgtcctgccaggggctgagggtcttttttgctctcctyctgacagtctcacagccagccacgtcgtggtagggtcccacagagctgcccagcatggggcaggctggccagagcagctggctctttgcaaccacccagattgcctttgctgggaagctcaggctcatttgcacactggcataactccacgtcactgaccagcccatgggcaacaggactcacagccaggatgggttctccctggggctggcacgactctgtcactgcacatgtgcattttcctgatcctgggcaagttactgaaactttctcaaccccagttctccagctataaaataggaacaccccctacatcacaggattgtcacataagggaaaatgaggctagagaacctggggtaacgtggaattgactctcagtgagcctggttccctttctctcgcaataaaagccggcaccacctgctccaaaggtaaagcctatggggaaagtctttcccagtgagccctgaacaagacagagggcccttccccacaaagcttcccaggcttggagaggcgggtggtccccatgactcattggtggtggtgggctgactcatttggccaactgtccttaatttccctcctcccattttgggagtcctggagcattcgttccccaaatgaggcttgcagccagaatgagctgtgattagcacagcagagaccagaaggatggtgctggggggaggcggggtaagctgcagagagtttcctgaaattaaggcaggagaagcagggaggcaaggtctttctccctgggccatttagcagacagagacttcctttagagccaaccttctcaacctctgctgggcaaaatcaactcagaggactgcctgcaatagccctaatatggccctcagaggcagacctggggtgtttatcacagagcacaccatgaaatttcaaaccactatgtaggtaacataggtgggtgcataaaacagaacattgccccattgcactgaatgcacaatgaacagtgggccccagaatgcgggctgtaccagatctacataaatattacaatctgaaggcagatgaacaagagggagtttgcaagggttgggtgagaccacgctgtacaaggcccaggtgctgtatagatgatgcagaggtgggtagggtgggaagagaggtcaatgtgaaggctcacatccaattgtttttcctttcctcaggaggaggatggatattcttctgttgtgggtttcaattccatgctgtcaaataacctctttagtccaatgctctgccactttcagccaggcataagcaagacaattgtcactgaacattattgggagtaacatgcaatggcacatgcactaatgcgaacatcagaaggaagacccggagtctagtctagccctatcacttctgcacagctttggcctgagtcacttaacccttccgagtgctggtctactcatctgctaagtgggacaatcacttctgacaaggctgctaggaagattacattgagagtgcactggtgattattcagcatgtcagggagggcctaccactccgggcctccacggagtggatggctaagatcccctgactcccagtgcacactcctcacacatggctgcacctctttcggcctcaggggccagcgaggagcctaccgacaaggtgaggtgaagagcgaagagaatcagtgatggaaatggaagccagcagtcagggcttgcaagctcagcccttctcaggtcctccaagaagtaaatcagctgagggtcagaccccaaggagcttcacggccagcaactcagcctggtttcctctcttttcctcgcatcacattcagtgacctatcagtctagatagagggtgctttttcaaataaacccttttccaacttgtctaggagaacaatcatagattttgatcccaaagttaaattggcctgtcagatacaaagctttctggagccagccagcatctcaggatatcccacactcctcccaaatgcattaccacccagcaggtagtgtcatcgcagtttctctggtttcagaataataactggtgggaaatgcccatggaattgacactcagcactttgaagattttatcagttgggtaaatatcacccagaagacaggagaaactggggttctgttacgacatctacaactagaaggagtgctgatcacttcttttccccataaggtctaggatcctataaccacgacaggatcagaggcaacctggtggtgaaaggtagacaaacccaaactccttacatgcccagttcagctgtcctcacaatcatcctacacatcacatgcatcctgctcaagagctcgtggccagcctcctccttcctacagtgccctaatgccctagtgaatcaagccccaccacagtgtggacgctcgtaacatacctgtgactccccccagcagcctgggatcttccttccactccattcacgctcatctctgctcgggctccaagcctcctgggcccattcacacctctgagcytttgctcaggtatttcccactcttgctctcagtggtctgccttctatttgtctaccccaactctatgcctctttctatacttcccccgctactccaacctgcactggtccctttcctgagcctaactggcactcacattttgcaccaagttggcacttaattttaaatggtcttgtcttgaataatatgctaaccacctctttcacctcctccagaacagaaaaggtgccttacacagtggagaagsctttagagccagaaaaatccttgattggaaaaatcagactttaccagcaatcaccactgcctttgtcaactcaatctctctgagcctcagtttccatctctgtaaaatacgaattgtaatcttaatctcaaagggctgttatatggctttaacaagttaatatctataaaaagcctagactcagtaactaatgcatagaaagtaacccccaaaaggttattccagttcccctttgtttcttttatgtcttgcagaacctagcacattatggcaacacaagacatttggtatatgtttgattcatttataagtagtataaagaaaaccagtaactggagggtcattatacaaagtagcagcatgcggtcaaaacacatggatctatttttcaattacggacaaaaagttgagatctatggagggtaaaacagtctactttaactaaagaagttttcaggattacaaactgccagtctctctgtactcatcactcagccaagcagaagtttcagcacaaatgttcatgctggcaattcatactacattctttcttacataagttgtctccatccccaaactccataatatgtatggtccacagaaagttcacttcacgtgctaaatgtggtacaatccttgctacttctttaaatcaaacacagagcaaaatttttctggagttctttttaaaattatttagaaagaaygccgatcacttcttttctgaagcagaatttttgtcatttatctatatatgtaacatatataaatataattgtatatataattaaattcgtcttctaataagacctttcctccccagattggagacaacatagtagacaaccatgaatattagtgaggtcattcaaccaaaatcatgctgagaataatatccaagtcctrtgagcaattatgaaatccatgcaccaaagatgatgttggatgtggtggtgtccagtgagatgaaaactggagtggaattcagatggagtttcagcagaaccattttcacctggtggccttttggccttactgttcttacagtttcttctcactgtctctttttcacatacttggcatttctctggaggaaaatgtgtcttgccactgcattcacttttcagctcgtggctcatgctaccraaacaatggaagtcaacaaaaggcttgagacattgcttyagtgtgaatataaacaagcctagaaatgtaattttagttagtgatcagaatacatatccgtgaaactaatcttctccacgtctccccacttcctggtggtgagttaggcaccaactcttccaggtcatctagctataatgtaaaacattacagaactaaatggggaccccaagaggtcatctaacccatgcccccaactctatgcaagagaaatgcttggctatcagtgagttccscatcagcctcgacagtctaaaatgcttggtgtcaaaagaactgcttgtctatttgttttaggcaccaaggtgtttctcctgtgctccctggagaccaaatgtaactggtcagtgcctttatctcagtgatacacataacaacagctattaagtgacccctaattcttttccccaagttaaacaaccccaaatccacaaacctttccttaaagggcttattgttcatcctgttaaacatattgttaataagcttttctgtactttttggatttcccacagtctttttccgctaattcaaacacagtggtgtcaaatattaaatagagctgaagcattgcttcccagaccttccacatcattcctagtttaacgcagcttggttatcatgctttcttaaaaataaacaacacaatactcctccagcttgtgatccactacgacttccagatctatctcagctataattgtgccttgccaggtgatggccaataatacaatcaacataatccagtcaagcagattgatgctaaaccattgatgaccactgtcatcacctctcaaaaaagtatttcctagtctggtgtaaagaaagatcaggtaaccaaacgatgtgtgtygttcacacaatgtttaataaaatacaaagcatagcattttctaacttttagtttgaagactctttctcctcctggtctatgcctgaaaactaacttctgggtgayttcatatgtgatcacagggtagaacttggagaaaatgaaacagatatttaacctgcttatcccaaacactgccccttttcaggaaacttggaggtaactggggtaacttagcaataaaccccgctgaaagttatcctgaggtctgaaagtcactgatcctctcagcacaatggagtatccactaacaatggctaaagagcatctcttcaataaacttagcttgactactaccacctatcatgactagctcatcgaccacccttcaggatcatttcatgtgcaactagtaagaaggtttcaattcagtagtaggtctggcatcagtaatcttctccaccatccaaggaagaacatgttatcttactggttgttttgggaggtgaagtaagaagttgggaaagtgtgattctgaatatgaagaatctgagtacttaggaagaaatatatctcagcaacatcctcaacattccataattaaccactttaaggagccacagccattaaagaatctgtgctgaccccaaagagaccatttctctaatggcaacaactccacatctcccaagttgggccccactcattgtctcctatcatttgtctcatacagatgaaactctaccatctatgttcacttaactcataagacccaagttgctagagatgaataatattagtcatgatgtccacaatggagagtcgctgttatgcattgctggattattcatagacacttctggtaaacatggcactactgcagtttggactctgtaccaaaactagaaaaactagtaaacagctttccaaaatcttgtggtgagatttttctggctgtgaaacatttgttgcatttggccatgaaatagtttacagtactgatcatgaaatgcatcagtagcctttcacctggtaatgtgaaattctctttccatagtcctgaagcttagaaaatgccctattaccaccaccaccaccacccccaactgagcagtgcaatactctcatttctaaattagggatcagcaaactatgtcttgtgggccaaatctggccaactgcttatttttgtaaataaagttttattggaacacagccatgcccattcctgtacatatcctctacagctgttttcatgcttcacccagagctgagtagttgtgacagatgtttgccttacaaagccttaaatatttactatctggtgtgttacaggagaaatttgctgatccccattataaatgataaggcaaaaaaatttcttattcagaataacctcctctccaacccaacaaaagaaaacaaaaccagaaaacaaccatgaccccagcgagtagtgttcgcatacttaaaagccagcctaactctcttacaaagtatactctgaaataagatgcatacaaaacataaaatactatttgatggcacagtagggtgactgtagtcagtggtagcttaactgaatattttaaaataatgtaaagagtgtaatcagattgttcataactcaagggataaatgcttaaggggccggataccccattctttatgagtgcttatgttcacattgcatgcctgtatcgaaacatctcatgtaccccataaatatctacatctactatgtatccacaaaaaatttaaaaaatttgtaaaagtctatatataaaatacttacaaggttaatttaaattaaaattccggaaggatttttttaatgaaaggaagttctgaaactgatgatttagggatataataaaactcaaatatggttctagttacatggagtgatttgggtttcttagaaaagaagggtaaraggaatgtgatgtaatagacaactggtcatcaataagaataaactgaattttttaaaaaatctctaaactgtacaactctacccagagttctaaagagaaggtcttccaggtacatgcagaggaaaaagaaatggataggggaatgttttctggtggagccatatcttgaatcatccctaacatgtgctgaataatgacctagctccatccagagaccaacccagggacccattcccaccacataacaatcctaagtcaggatactgctagaggcatccatagattaaggcaaagatccrctgttatgagaatctgaacaaggcatgccaacctcaacttccaccttacccagactggcagcccttgggaaaagctgccccaaagccatctaagtgtgcccagtaggcacatggtcatgttcagttagggcactcaaagctgatcttcagttttcatttttcatttatcaccaacactgaaaaatggggagatctcatcaaaatgtttgaattgtgacctcccttgaaaaaaaaaaagatctgggaaccctgggcccacctcctgcaggctgcatcccctgagctgagtcacggctgccccattggaagcacaggtgcttcctggtttgagacactccctaccactcctgttgtctccctgtgacctgagactgagcctcaagggctgttccacatctctctggcattgtcatttatgtcacacctgccctgcttcattcaccaaagatacctgctctgtcagcatcggattggcaaccccagagctaaccatctatggtaactacatgtttccgagtggatgaggaacatgatttctttctctctttttcattctctggcccatgtgtgtacttttgccctccctcttggtcagtgaccatctatagacagaaagcacatcattcttggcctacaacccattatcagacacgtgaaaaagtcagtccctgtcctcatggcccactattatggacatttgatcatcctggatctcctctatccttagttatttacatggatagtacacsttcatgccagacctctcatccctgtgagcagcccaaagatagtatatgcaaagaaagcccgagtcatgaggaaagacacactctaggtagaaagcactggcccatcagaatcaaggtcctcttttctagagagtaaattagagggtgcaatcgcttcccatggaagaagatattttattccttaggtgacttcttaattgaacctaatgtctcaaattttgagtcactataggaagtgggtgatgtgtaataaatatgkgaaacttcattttactcwgtgttcatcaaaagatacrtggataagctaaatgcggtttacacatgcaatgaaatactatttagccttcaaaagtagggaaagtttgacacatctacgtaaataatccttgaagatattacactaaatgaaataagtccgtgacaaaaggacaaatgctgtatgattccatttatacaaggtacttagaggagtcaaattcagagggacagaaagtagaatggtggttgccaggagctggggagggaatggggagtacgtgtttaaatggtacagagtttcagttggagaagatgaaaaaatcctagagatggatggtgatgatggttgcacgacaatgtaaatgtacttaatgacacagaactatatcttaaaagcggttagaaaggcaaattttatgtaatgcatatttcatcacaataaaaaggaaaaaaaaaaccctaaggagggcaccatactggtgtggggctttctttttactgctaggaawacttacaaagtccataatgcaaggcataacgtgatattcagtctaaagaaagatggagtacactagcagcagcattacagtgtcatgttcatctccacttggccccactgggggccagcaatgctcaaaggtcaagacctggcctgacatgctcacctggttctgtctgacctagaggacccctcagataagagggcccatcttcacacacaaggaaagcctaccccgggggttccagctgacagctgcaccaaccggcagcttgggaggctacaccaacagcaccttccaggcaatgaaaattttaacctcccacctattctaagcacacattaaatcttgcatttttgtgcaaaacttctattcttggcacaggtgtgacagcaaccttggacaggtatactaagtcggttcacataatcaggctttcaatccatcaattttggccatggagagggtgatgatggtgatggtgatggtgatgggggagtgggtgacagcaaccctggctcagagaatgaacgctggcaccaaccctgggcattgttcactttccaggccaccatctgtcagccaagccagtggcaactgctgttctagaccatgcttgtaaataaaacaacaaggttcaacaaatcttggcatggaagtgggaagaatcatctcaggagtccctgccgcatgacggcgtgaaagtgaactcacacaggatgagcttggttggtcaagcaaattttacagagatgctataggagcattggaaacagactttttatttaacagaaacttacacacacttggtacaaaccctacattatgcaaacctttatcacagttctacacaggttgtcacttgtgggagttggttggaaagcagattattatgataattattagcattttgacaagggacattttctaccagaaaacgtcagagaaaagggctacaaaatgatacagacactctcggtgatcccctccaccaacaggactggctttgaacaggaaacctgaaaggactggcaggaagtcggtgcccacctgccctgccctttcagaggccaaagagattctcaggctcagaaccatttcagtaacactgtgactcaaggacctctgctgaccagaatacccagcsttagactattcgtgtgttattatgactctgcttacaagggagggaaacccaagagcatggctgtgtgaaagcccagtgcagtggggagcctgcgggtagaacccagtggctcagccagtcagccctgcacctttgctgggccacagacacagcgccgagatacatcccatcggccaaaacgcccacttccgccagctcagccagaaagggccaygttagaacacccgccgtcttccttggctcccaccagcaactgaatttgaggttctcatccttcaggtcggccttcctagcccttggggacagctctggaagctcaggccccagaagccagctcagcagaaggttccctttcctcatctcttctaggagttgttaggtgactgaactaatatcacctcagctgatgcttttatttttgctttttttttttttttttttttgctgcattattttaaacaaagctctctgtgttcgaatctattgaacttgaggggatatattccatcaatagatggaattccttcctgagctagacctcatcagacatgataactaggagncaggctgcttctgacattcagataaaaggggcttgcctggggtgagggggcaatgagggtgggggaaactgctgatttgtggctaagttatttcagtcaaatcttaacacacaatcatttaacatcaccaacactttcaatagacttttgaaggaggaaaaaaaaactgagcactcctcacttaccacatccaactcgcagaaataaaaatacctaaagcacatacatgaatggctttttaaaaagcctgagagagcagagttgatctttattttcttayttaaaatgtggggcatttttctttagagttaatatgcagtcttttattttacattaagtactcttatgatttcatgtcttcacaaaattgcgcttaacttttgaagtaggaggtactttaaacaaaaatactgtgcmatgtcagcacttttttccttttaaatattgaaataaataaaatagttaactctttttttccatcagtttgtttgtgttcagttatttctactgtagagtaattccaggcggacctgggtactttctcacagacaatcaaagaaaatataatgaagatttaaaaagaaaaaaaaaatcttcttattgcacaaactgaggccattcccaaggcttctgtgggctgagctgagttgcgctgcaggattttccactcctgtgctggctcctgtgttgtctgaaacacacgcacaggagggggctgggcaagggaagaggaagaagaggaggaggaggaggaggtgccaatcatcctggcttcttttcaccttcttcggaaatggcttgcttgaaggatgctggagtccccaggtcataatgttgactgcagagggaaaggcaatgaaagataaaacaaaaaacaacagcatggaacaactacttaaaaaagaaagatgaaaattaaggggtgacagaaatgaaatgaattaaaaaaaaaaaagaagaagaaagaaagaaaaccaccaactaattgccaagttaatgaggctaggccaggtgcaacaaaaatcagggtagtgtgtccagcgccttgaacttcagcagcawgagatsagccaggaatagggcaggtcagttgctactgggccagaggcagagagarcacagctggatggtcaattcccaggtggtgtagcaggcagaactgggtgttagcaaaaaaaaaaaaaaaaaattcccctccacttaraaaccaaacaaactgaatcttttcacagttaaaacaccccaraaaggacctttatgatgtcatctctctccctgycatccaagtaraaatgagtagttctatggtatagaaccaattcagccacagaaaaccccatcaratgcctcatttggcctaagcccaaaaggacactgcttccttcacaagcactcacactcagccccaaccctgccccaagtgattcaagtgtgtcaragttactcggagacagtccccaaccaagagaccagttccagtcctctactagcacagtgatccctttgtcagccttggaacctggtggtggttcacacaggtgggcccttttgcctggatagccacgcatagcttttgcttctagctgaaatgaaatctgccattttggtctttggaacggagtagttgacacaaaggagtgagcaatgaaaccaagtactgccacatttcaccccggaagcagtttctgaaagcagagatgggtgtcccaacagtgcctagatcacattaagctgagcgataagggagggagaagaggsagaatgggcctaaatggaaaatggccaagccagcaaggaaaaaagctcaaaagcaaatgagcagctcagcctcttccaagttgaaaggcccctcccctgccccacctctcctggtacccaagcatcactcaatggccaggtgcacaggcctggattagatgctcttccaaagctgagactccattcatccaactttcctccttgaccaagtcctccctccacacctgctcctgttccttgcctctaccccatcccaccccactgtctccctttctgatccgctttgctggtgcaccctacccccacttccctcatgctctttgctgtcaccacctgcctctagctccttcccttgactgatcaaacccaggtgacctttcctgggacctcccacagaacgcctgccgattgttctctccatgggcatctgtcatcatttcactccctgccaggagtctttctgtccctctcccagtgccctgacccctctggtcagatgttacctgccactctgtagtgagtctgtctcataagcttaccccacacctttcagtttcttcaaatttccaccccgacctcccaacacacacacacatgtatttttcctttgccccactaaagccacctagaaaatcatgcgtgagtcccaacttggcactcctaacttccattttctcttttgtttcctctggtcaggtcaactgcaggccacaaaaatgaaacaatgtgcagctgtgttcttagtctcctgctctcaatcccctgcaagaaggcatagttttctacccctccacacacatggtcaacccctccccacccctgtcctgacatcccccttttctctcctttacccctcaccaccacctcaccacctcccacctgccccctctgacttaaccactggatgctgtgtccagagacttctccattctttctgtcaacaatatttattaagcatcctctatgcatagagtgagatttggtaagacttccactaattatctcagaaactgctcagttctcagtttatttcaacaaataattatggcacactggtgtcaggcactgtctggaggayatgagtgatatcacctttgccctcaaggaacacgccatctgtttgagaaggactacaagcaaacatgatgtgttgtgataagcacaggagcggcaggaacaaaatgctatggaatggtacttaggcgggttttcaaatggtgatttttgccattttacatgggttaggttgtgattcccagctttgctttttgttcgaatattatctccattgtctctgacaatagacattcttgcctacagattcaacagcaacggtccatctggagctctttgttgatctagatggcttcctccaagaaaatcttcttgtctactgagatccatggcaaaaataatcacatactaccccatgacagctcttacatgattttaactatttgtgaatttctagtctgatccactaggtcacaaaataaatccaatggccaataaattcattgccccatgtttaattttatcctatccttgacagtgctgagcagtcacaygcatactgttattactcagtccctagttgccaaatgaaccgaggtatatctgaatgaaaatgttatcatccaaggtctgtaaacagaatagcctgaaatctcagctgaaaggccaaatgtctgagtcaccagtaatggggtaaatcaatcacatacctcckgatgtaatgcactgagaaggatacaacatcatttctaaggtattctaaccaaaatgcacaacttcagtttagtcattagaaaaacagcatccaagcctgaactgaatggcttttgctatgaaatgactaaccagtatcgaggttgwgaaaaacaagattgtagtactaactattccagattaaaggacttgtaagaggacatggcaacctgtgagcccagactggatcctggaccagaaaaaggacactagtgagacaactggcagaatttgcataaggtctgtaggttatagcattgcatcgatgtgaatttcctgattgtgatcattgtactgtggttatttgaagaatctgggtgaaggacatatgggaattcttggtaaaatctttgtaagttttttgtaagtgtaaattatttcagaagtaaattttttaaaaagccatagttattggttgagttccagtggtgagatactttgaaaacctaattgccaatgttttttatctaataattcagttctgacaggaatcttccatcattcccatttattttgtaaaccaatcatgcagaatggcttttcctatattgctattttgaataggtgatcagaaatcacttttattaaacaccacaatattatataattcaatgtttttgtgttagaagcaattgggtttgtgaccagggcccaaaatgttcactccctgccaccattactcccgctaccactggcaccacaaaaacagtgaccatttaggaagctcaactttagttctcccagaaagttcatgaggacttagacattgctacttctcagaaagattctaatgtgtcatagtttcatttggggtttctgttgtttcagttttttcttttacagaatcaaatacctccttttcatccaataaattcttgaataaaagacctacaggcattttactgatttcactcaagaaatcttccaaagatgatctttggggaagtcagtatagacttaggaaagattattagaagatccatacatcatttactgagcctggaactttagacaagtcatcaaacaggatcaaatctcagtttcctcatcagtaaaacgggaataaataacatctaccctacctcatagagttaagcatcatcatgaaataatataagctacatattctaatagggaaagaaatgtccatttcctctctcagaaactgaggcagagatccctgtcaacaaattcacacagggagctgagcccagagcccagaacttgtcawctccactctaggcttccacacaccagatcaaagacacctcactcagaaaatacacaacacaagtcacttctcctccaaaggctgagcaaaatcccctgaggaaaaattcctaacagatgagtctgctccaattttaagtacaygttcaagatcatattcatcagatgtaacaggaggtatactgggataaaattaattaattttattccaccatgaggtgagaacccccaaacaccctttagttctctccctgagtaatgatcttgcattccctccagtgctgtataaagcagtatcagtctgtagcccattagatgcagagagagatgcasagtaagcaggaacccttaaagggatgctattgatgtgaacatcacatttttttttattaaattcttctctctaaaataccggtagcaaattggattactgtctttatagtacctctaaaaaattaaatgcatatttctaattcccagggtcatagtgattatagtgtctgatctttacatagtctctcagtaacagaaataaaggatttgattgttctaggtagggaaaaaaatcagctagaccataacaattgtcacctttaggtcaacagcccccctccccaggggattaaaatgttgtaacaaatttagaaagttctatatctttggttcccctctctttggcctgggactcagaaaactcagggtggtactttactgagctgagggcaaaggaagctggccagatygttttcatcttgatgactctaatttcttttgtattttaaattttgagtagtgatacttatttaacaaaagcaacaacagaaaggtgtgttgactgttcacacagctcctacaattcctaaggtcacaaaaaaggtgatctctttgtacattgtctagaagtgatgattaagaaggtaagttatctacaatattccgcagagaatctgaattagaactctcttttacaggatctaattgcttactcttccgttgttgaaatttcttttaatgacgttaccttttaaaagctatattcattacaaaaacccttttcttcagttggaattgagaaacagcaaagtatgtatacatgcatgcatatatattccttaattatagactatgcaaggggcaatgcaggcaacgatagagtataggctctacaatcaggttgccagggatcaaaacctggctccttcctaggtgtacatttcttaaccttattactaacctcagtttccgcaaactggggattaatataaacacctatctcatgggagtagtcatgaggattaagtgaaatattccaaggaaagcgcccagaataatgcctcacacaaaaatgtagatgactgctatctagaaaaagggagataaakatatcacatccaccactaaagtggttggaaaccaaggacagccagcttcctcatccgacaccttctctctcggagcttccttcctttgccttaawacatttccctccaatgcaatgcccatcccagtccctccaacttaactcacttaacctctctgggtcaacttttctcaactgaaaagtgaaagatttgaacttgatcatcttaaaagtcccttccagtttttaagggtataaatcttgagtccgttcaaagactctataagcaaggtgagacaagatggtctggccatgctaagaaaccttactatgcttctattaccccaaggaagaaaagtgaggatatcaactacctccaagaagagaaactgaagatcaaatatcaagctatactattaaatataaaatagacaagcaatacccattctcagataaacattctcctgggagtttgccttgttagttctaaatggttagtttctctgttagactccaagctagactctgaaattaggtagccttttataatttgctttaaatatgtggattaaaaaaaaaaacacctcaagtgtaaaggcaaattgtcattgagaattctgggactatgagcaactagacagaattcaaatgagagtgtagattggttgaacatatgtttattaacatagaagctcacattttatcaatgaaagcaagttgtaatcccatgaatccaatatctgagtcaaaggtacagagtaaagaggtggaaaatgacagcaagtgtacattgtatccccgtagcagaaacctactggaacaaactctattggctgacgtgtgagcatgcagaatatgacaaccttggaggtttatgccatatttcctaggaacaggccacatatagattagacagaacaacccaaaagtggttgggattgttactttcattccctcaaaactgagaataaatgcccaggcgatcacatacacatctcaagcatgagaaaagtggaagccctttctgtctcaggctaccaggaaagcacaaaggtctcatttctgggtttcttggcttgtccttgtgttttaggttggtttgttattttaaggagcggtctaattcatgaggatctgcaggggctggactgtcaaagtagatcttcccagagacactgataagcagtctgttaaccaggcagctacttgggtctcccaacccatgtcaaatggttctgcctgtgtttccagaactgtgcactcctggaggcaagagaccctggccaaccttaaagggagtgcagaatcttccaaacagccaagttgagttttgtgcctaatcagggatcttctttaatttggactcatccccttggttttgaaattggtaccgagagtaagaaataccacctagacatgcagtgccctgtggccacaacctccctattcctacccaaatccagcagccaactccaacttcagttccctggatttcacttccaggtttagccaagggaggcagagttagccaagcacttccccagccattttctcttgtagttgaagccagaagcctgccattctccacactgagcccctcccatagtccaagcaagactcagatcacacacctatgccagggcccacatgagttcacatgcacacacaggccacagagggccagggggagacactccagcagccactcttacactaagaagggagtccaaacccaggaaaacaaaaaagcaagctgggggaaaaaggaaaaagaaaaagaaaactaaaaaatagatatgatggttttgcccacattgcaagacaggttagccaagacataccttttgactaggacctcgcagccggtcattcttgggactgtcagtgaggtgggtggccttctccatcgccccaggggccttgagcagtgttgctttggtttatttcaggaagtgctattggaaacataaaacaaagtgcctggcaggcactataaaaaaaaatagaagaaatacggtagccttgatcatccaatgggtattgatacgtttcttaacaggggcaaggggaggggaaacacacgatgatgtctccttctatcttccagaagcacggcctcggcctcgggtggtggagtcactgctgagcccatgacgttctgcttatattccatccctgcatttggaagtcgttctttgccaggaggraagtgaggaaaaaccagcaataacaaaacagcagctctactgacggaggaggaggagcccaggaggcggctggtcagggcccaggtgtggagggaggccaggcataggcaccccgacttctctggaactactgacattttctcgcaagcagagaggaagatggaaaggtcagggaggagaatgagggaggggtctgccgcggggagccgcaaactccgtggggcacagaatagtgcaaccgtctcccattgaggaaattctccccaccgggcggcttgcctctaaacaggatattgcttcgatttctttgatttcccttctctctctctctctctctctctcgcaaaaaaagtctgattctaataacagctagaatatataaataataatgttttaatgttattggttctttgtttccaacccaaagttcctcttctcttccttttgccaataaatatgaaaattgaggacatcaactctgctcctgtcaaaaagaccccctcccctcagaaaagagacaatccgtctaacttcctatttctatggaaaataaatagcgcatcacgatgccatctctcggaagaacgctcattctgctgttttgttttgtttcagtagtttgtgcttctgttgtacatacccaaaacagaggggtggggggagggatggagggacacgtgggaggtgaagggaaaaaaagcaaggatagagggaaaatctaaagttgcctttcattaaaaaaaatatatatcagaaccagcacaatgaccaaagtcagagggggatggctaattgcccagagagtctgttccgtgggtttagcaactgccctttttatctgctgtgggcgaaccccggccactgcggcgtcctcgacaggagcgaggctcttccaaatcgtcctcatcaaagccgtggaaagttgacgtgtcactttctgacgtggaaccgaataagtcctccgtggtacgtgctgcggccgctgcctccttctccttcctgccttctcctcccaaatgagctgacatgtatgatgaatatatcagcacatgggttaagcaacagacagcattattaatattctcattacattattacaatgctattcttaatagcaagatataaaaccayttgcacaccaaagggattaacccggtgcatcamctggtgacggggatttgggacaaagcaaacatttccagggaagaggcttcccccactccccgaaaaggcatcatctctaccatagtacatatgtccacagcttccgacagcaaaagattcaaccatgatctttcttctgttgtgcatacacacaggcgcttgcacgctcactcaaccctgccccagacaatgattttcattggtggtttttaagcctggttgggatttctttggtgttttctgttggtgtttctttgaacaatgtttgtccttcactttgacagtcagctgtacaaaggtattactgtcagataacccattcaaggtggttaagcctccatctatttcatttttattttacccgcttctaatcccattctttcagaaccctttcaattctccccttacgccatgtcgttcatttgcactgaaagcaaaaggaagttggaaagtctgataagtggtaggtgataaaatagtttgtttcctttaaccacaggaggaaatttctgtgatctgcatccacatacatgtgcacgtgtgcacaccacacacacacacacacacacacacacacagacacasacacacacacacacacacccagccaccagccatgcccaggtatcggttactccagaaagttcagttgtcaaatctcattcagggcactacaaaggtgagaaataggagtagaaaagccctaataaatcagagcatcctgaaatytgtaaaactcaggtttaaacttttttgcattctaaatgagccccaggactgctcttgtataaaggaatgatacatccctcatggtgccaatttcaggaacctcactttctcccaggaaacagcagtggtagggtagatgggaggggaaggaagctcttccaagctccatactcttctctggaaggaccgtagggaggctccagagaagtattcgcccacctgccttaacaagcacatctcatctcatgggccaatgacacctgtttcttcccatggtatcaactatttcaggaacattagagtcagaccttgactaaatcatctaccaaaaccaatccttggcaaatgcagtgagaatacctaggctggtagaaaatggctccctgagccacatagcagacagaaccttggagggaaagctgagggaaggttgtggaaagaggctttgcatagaaaaaaacaacttcccactcctgacatcccatggcttcgattctagcacccctcttttgtaagaaaggaaggggagaaattacagcagtttgcaatgagaattctgaagctgccccctctaacccatccaaacctacagcagtccataacgtgttgcttagaccatcacttcaagtgaccttgcttctggaagtagagatttcatctgattgcttgcttttaaaaaaacactgcattgaatttcatctgttttttttaagtatcttaaaaaaacagagtccgctatcacaagggccctgtcttctacgctagcatccatagaataaaaaattcaatgttaggtaccatgtttggaaagtaaatgaaytgacagaattgcacaaatggaccacccttgagagtcacacgttgagggttgtgtgcagcagaaaccacagtccttttaaaattactgatttgctactcaagccagccttaagccctaaacagccctaccatcaaaatataaaagggctaaagctaaggtttgcagacagagcaaggaaagagctgagttgctacagtcaaccatgatggggtcatctcagttcttctctggggactgggagtgaaaaagacactggatagaaaggtagaaaggagaaatgactcctcattgctggaacaaagcatccaaccaaactgtttcacctactcatatcaggggctgatgagactaaaaatggggttgaaattccctcctccctgcctcacactgtggtctagtgctgacataatacaatatgaaaaataggtagtaccaaccaaccatggccagccaaaaataatggtttggttagaactaaaaaacaaaacaaccatttgaacataacctgaagacctgaattcattttaagaatgaaggaacaagaccaaaagtctctttctgttattttagtctttggataggttaaaatataaacatatacaccaaatcaactgcagattagccctaggaatgcctgtccttttgcctcattgatctatcggggtctcttctgttctgttttagaaaatgagattagtggccaatggcggtggtgtttatgcagctagccaggagcccggggatctctgactcccacaattcaagatgtggttgctctccgaatactcatgtttccacaccacaccacactcttcgggtttgccctaggcacttccacagaacaaactcatctttctgttacatgtgcatcatccactacaagaaagcacgttgccttctctccaggtttttccactctacctcgctgtggtccgtaaaaacacgcacaaagaaatatgcacctcatggaaaggccagacacaaacccaaaacttctctttgccctttcccccggatcctagggcataacttttggttcttgagacccaaagaagaaaaatatcagaatgagctgaaaactcctctccactcgaaagcattgccaccatcgcttccctctccagtctccagcaccacaagatggaagaggaatgcaagaggagcattcctggtctacgggcacccggtgtgggaaggggccacactcaccagagcgtccacagtctgcgcaggacaccagctcttcaggccgcccactcttcttgttcatgttggagccccccaagcagaagtcacagtagttattgggaatgactgttccatccggtcctttctgggctgtgggaacatttaaaacattccaatttcaggcttacatgagtttcaactgccccttcttctcctcctacagtgtggtagaatctgctccagaaggaatctgaggttttattataaccaagttggcaaattgggctacgctttcttttggatccttccgggtttaatggtactaataatatcttgcaagtcacccagagtttaatttttagagtattccccagctctgtgttgttgcagaaatcaccctgctcctctgattgcatccttagatgatcaaaccatccagaagaggtactggtcaagtgaactactctcagccctaaacaatcagccctgtgggcccaggccccaggcatcagatggaaaccacacaccatggtgtgaggacagggagaggaaagagccagtgcctggaccttgccattgggaacagtgctcttgtttaggagatattcttcctgyccctgaaatggaaaacaaagaagcactgatgggaggtcatttccaggaataacaccaaagatgctcttggggacttggacaaacaacttggtggagtatcaatctccctgaaggggagtctcatctccctgaagtccagacccattgatcatggaaastgcccaagaccccaagtgcctaaaatcagaactagacccaggcttctaggcacttggctcagcctcatgccagagatggattaaacggtgagttactgagcatgtctttaggcttaagaccgtcacgaataactgaacacactaacttcaaaacccactcctgctggaggtccttaaacaaaagcaaagaaaaatcttaggacatgactttgaaaacaaagcctgtgaggagaatagcacctgtccttatgcaccaaaatcattccatttccaggggctgcttgaraagccttgaacagattatttgcatggagagaaatacttccctttttctgtttctccctccctattgcgggcatttctttgtcatattcacactccctgtttgtaactaagaagaaaagtctttctgtttatgggatcagccctaaccacccaagtatcttcctcctcaccagacccagtgtctgctgctgcctttcattattcactggctaacgttaatcagggtcccatacggtacaaatctgaaaaaggaagcagagatgtgagcagaaataccatccagacagtaagtgataaacggattcacccactttaatgtgattccctctggcctccacttcctccatgcctctgctttgcctccaggaatagaaaacctacctggggaaggcggaagacaaaagctagaggaatttcattatagagggttaatccatttatcagttgctatttggattgtttaattggtttctaagtcattgatttccatcttcagggaggcagacaattctctgcaagaagtgttagctgtttgggggacacagaggagctggccacattctggggtctgttcagtgtaggcttgtcttcatcagtccctggatctcaaacacatttgcatggcatacagaatgcttttgcaaataatctccaaaaagcagtatatctgcaaatattttactctgcctataaattttcattgcccaaatccagaagtaccagagtccccttctcccttctccctcaattgccatcttagtcatttttagaactctcctaagaaaatccaagcatctctatgaagcaaataaactcagggtttcctcaacaagatatggatggaaaactatcaaatggtgaacagaaagaagagatagggtatactaaatttaggggctgagggtaaaccaaagttaagtgtcatgattgatatgagctagatataaaatgtggagatgccagttgttacttaggtagcttcctgtatggaaggcaatcagagaatcccatatatatcattcataaaaacttacagggggcctagtctcctcagctgtctctctcctatactcttagggacttcctataattttcaatttcctccccattcacaagatctttaagcaactaaagaatctgattttctccaacacactgtctccctcatgacgtatgaggatgagtaagtaaaatatagagtataaaagcttgcagattaattcttgatatggtttggctgtgyccccacccaaatctcatcttgaattgcagctcccataatccccacatgtcatgggagagactgagtaggatataattgaatcatgggggcaggtttttccctagcagctcttgtgatagtgaataagtctcatggcatctgatggttttaaaaggggcagttcccctgcacatgctctcttgcctgctgccatgtaagatgtgcctttgctcctcctttgccttctgccrtgattgtgaggcctccccagccaggtggaactgtgagtccattaaatctctttgtctttataaatcacccaatctcgggtgtttcttcctagcagatgaaaatggactaatacaattctacacagcattcactaccaacagaccattggtagaacaccctattgaatcaggaactctaatactacaagaaataaaaaattagaaatgatctagtagagctaagcaggcagtgatggaagaattcagccttcgtaaaaagaccaaaggaaaagaattgaattcatctgaaaaagggaagcttctgacgagatggagtctgagcagcatcctgttggccatacagagttcctgtccaaggggtgagggaggtcctaaaatcccatgtataggccccggtatgtgcaggagtgacatgccaggccagctggggtgtggaggtacatttttagtctggcaatggcccagtatagaaagtgatcatgcacagctgttttatttttcagagaaatcatttttgcttcagtttctactctttcttacaacagtgagctcaaagcatccttccattgtggtcagatggtgtggaatggactaattgcttatgcacctgattttcttaaacattttggtacttgggattagtttcagagcaagggttctcccatggagctctcccaaacttcagctaaaacatatcagtcatgccctggggagggtactgttgatatcaccattatgacccttgtttatattgagtctgtgtgcctcctctccccgtttcacattatcatctctccatattaaataggtctactccttcaggttggagaccaggtctaacccgttgttggaacccctacaatctgtgggatgagtgacttnagagagggatggcagggatgttagtgggtggyacagtgatgccctgggagcaccggatatcattcactgcccctggtttatttccctaccagaggagagctggtccatgtgtgcatgaattggtctgtcacctggtctcatggccagctcccagagtacacagaagtcggtagccaatggccctgagtcactggaagaataatactgtacccctcctgtgggaggcgagacatcattctgcaccaaacacacaagaacatagaagacaatgattcattgtctcttgagaagaggatacctggtcatgcctatccactcagcttcccttttgttcaactgcgtattgaaaggagaagaaaaggaagcagacatttatcacaccacaaaactgtggcaaatcttttgctggatgctttatatatgttatttcattgattcttgcaaaaactttgtgaagtagggaattttttgacagatgcagtaactgaaatccaaagagattaaagcgctggctccaagcctcggttgggctcttcgaaggcaggtttcacccccagtttgtctgtgtccccagagattgtgcctctaatcacacttctctgcctcctgggaagtccagaggtaaacactttgcagccataccttgcatataaaatatttcataaatctctttagagtcaayctgattcgcccaatatgatatttacgaagcccaaagctataaaaattattgagaccggcctgataaaagtggaaattccctttgaacttaaatttaatgtccctactacagtaatccatcctgggtgatcctgtttattgtcatctactctatgaaaacacttctctggagaattccagaggctcatgaaggaatttttttaagtaaagctcacatcatggctaggttggcctatggcctgacccagccatgagcaatttcctggtactgtatatgagatcattataaaaaagattttactacaaataggaagctcgcccagaccttgtaagtgggatttaaatagagattttgcttctgcttatgggaaattgagtcccgctttatagaataagatgacggggagggcaaagacccgactggcatctctatggcagcatctgcgatgatggatgtggttttctgttgattaatgttcatgggctgagatcatataagagatacaagtaagttgctgagaaaataaagtgagccttaagagtttagaaatctacctgagggagataactctaaaaagctcaaaggaaaaaaaatggaaatcaggaacaaagttcatgaagaaagtagaagaaaaataacagaaggcagggaagagcattcagataaatcaaagcaagaaaaatgaaaagtgaagcttcacacagccccatcaccacgctcagggaagcgagagcaggcattctggaaaggtatcagtgctcgctacaggatttttgagttaaatcaggttttatgtctatggcaaacaaggccccaaatcttccataaaactaccgcccaggcagcaccgcctctccccctcccagtcggatctccgctgtggtgtrcctgccactcacagaaagaatgactggcagggacaaaccagccgtcggcaacagccactcgtctgggttctgctgagaccagagctgcgtcccaagcatcctagggaacaggaaactggccagaagttcaggctcctccttggcacgtgcacaaaagcatggcctcacatcctgagcagacgctctgaccacctgccagggcctggtgtgcacaaatgcgcggccacnctcggtgcccaccacccaccacccagccccagccccagccccagctgagcagctccatttctggagcctgctagcctgggaagttggggtgcacagcccttggggaattcgggggcagtgagcagagccctctgggaagagatgcgcctctcctcgcccctctcgtttgttccccccgccaccctccacaggctgacagttcccgtgtccctctacaggtctgacatgtttccatggcaaccggaatcctgggctccggcagcctccgctcttgccacctgttatgacttcatctctcaagtgtaaagcatgctagccccgtgccacttggctgtgcagagcgcatcttcagaggacgacggagggaaggaaaggggagaggaaaggagggaaagcagacaggcagcccaggccggccaggcgggacgtgctggctaggccagtccagaggaggaagcttgggggccggagatgagagggtggggagtaagggtggaccccgacgtgccttccctgcagaatcaggagcaagcctcagctggaggccactgccacagcctgctacctcggcctagcctttaatgagggctgcgggaggagggagaggcgggctggggagacaaggcgcctgcgaggagctccggcaggcccagcgtgaagcagagccaggagagggttaaaagtggcgtgatagagactgtggggaaggctggaccagagggcaaagggagcatcaaagccgggataaatggccttaattctcatgctcccactcgctggtcgtgtttactcatataaattatcccccaggcctgacaccttttttcactgcttccctagaactgatgaaaaaataaatcccacagatcccaggaataaaaagtgtggggctttcattcaggctggttctccttggccactaatagcaactcaggtcccgccccagggctccaggaggaagacaaaggaaggcttcatcccaaatgtggaggggcagggggcctggaagcctggcggggaagcagacagtagggcccgctccccacaggaccctccaatcgtcagagccctcgacggcagagaactcgctctccccacaggccatcttgccaccagctctgaggacaccgtgaatatatgggaaagtaaaggggactacgctggagcggatgcggaaggcgctgaggccagggctgctgtcatgagtcctcacatttatggatggggctgataaactgtcacactccgcaccgtcaaggacaaggtgagaagatgagctggaatggcagcacatgccacaggagagctggaaaggcaggtggctaacaacgaaagccatggccagagggcgggcttctctggagaggcctctgcacacagggaagggcccctaggcccggggttttgactgcgttgccgatctagaggcaagagaacacgctaggtgatgtcctgaggtccctttcaggcctattattcaagcattataatcaggtgaagaaagagacagaaaagccaagttttccacacccagaggaacccagcctttcatcactgttctatactcatgtaaatgcctctttgcctgttacccatgtgctacctgagggcacatgagtaacacctgagggcaggaaccatgtccttcactgcggtatccctggcccctggccagcagtgagtgacacagagctgacaatcaatgctgagtgaaaggatggacaaatcatcacagaggctttttgaggggaaaaaaaatctgccaggcaaagggaagttaatgactaggaattgagtggacggagagtcccccgagcacagggtgaccatcctaagtccctcttatatcggggcacagaagaagtgggaaggagaaatattggagccccttggagagaagaaagctgtggtgtggaaagccactgcatctacctcccccaggaatcctctctcttaggcatttcttagtcaaccagaatggaaggcatcaagaatccccaggctcagctggccccagagtcttgagactcattctgtctctcaccagggactcagcaggagccagtgagaacagaggccccatcttgctgcgtgttttggtgactgtagaaataatataaatatttcaaaatgtggcgtcaaccctccacccttcctatgcctgccttcttttcctccatctttatccaatacttacatctttagatacaaacctggtgaatatttactcccaaaaactgtgccataaaagcagaaaacatatccactcacactgatgtctccatcctgagatggatatatttggtgagagttgtaatttgcggtttgccaaaaggccacaacaatttgccagcagtgtgtgcaccatgtcaccagctctggggctagatggtcacacggcccccaaggaatgtcctttgtgctccagctttaggtgggcaaccctaggtctgccattaatgcttcggaatagtaagaaaaagaccaagtaaagcttaggaatgggtcggatatgctggctcacgcctgtaatcccagcactttgggaggccaaggcaggtggatcatgaggtcaggagttcaagaccagcctggccaacatggcaaaaacctcatctctactaaaaatacaaaaattagccaggtgtggtggcacacacctgtaatcccagctattcgggaggctgaggaaggagaatcacttgaacctgggaggcagaggttgcagtgagccaagattgtgccactgcactccaggctgggcaacaagagtaagactctgtctcaagaaaaaaaaaaaaaaaaaaagcttaggaatgttctcagtgttcatgacactgagatgaatatctcattacgtgacacgtaatgagatatttcagttttccagtgtttggtgatatgggtcagttcatgccctggtgtggcaacttgtgattgctaccaaatgagtttgttgaaggagaaaatgttaatttgagagcaactatatcaaccaggctctgaacaaagtgatgtcactccccttaatgaattccagacagcttggtgtgttagagctggatgagttttgtctgtttaagttgtcgggatattattatcgacataattaggattcaacaagccccttgttttgctttgcccagccgtgccctctcaaccctcttcactagcaccactgaactctgtctgcaaggggaccagcattttctttgttcttcagacagaaagccgtatttaagaaaagggaaagcatgagccttctgctttagacctgaggatttggaaggaatcaagagaccacagartcttggggcagcacagcctgaggatggtggcacacgcaggggcgcactccaaaagcaggccgggaagttggtgctgagagtcagagacgtctgccctacatgggatagagcattaggaaaagagcaaaaaccaaggctgccccttcaatttgacagtacaacctaactcctggccagttacctggctcagtgcatccaaaagaaaaaaggaattaaaaggaagttgactgactgaacatcagtcttggaaagctagatttctgtaaggtagtggtttacctgggaacttgtcaaaaatgcaaattcccagtcaggcacagtggctcatgcctgtaatcccagaattttgggaggccaaggcaggtggatcacttgaggtcgggagttcgagaccagcctggctaacatagcaaaaccccgcctctactaaaaatacaaaaattagctgggtgtggtggtgcacacctgtaatcccagctactcaggaggctgaggcaagagaatcacttgaacccaggaggtggaggttgcagtgagccgagatcgcaccactgcactccagcctgggtgacagaacaagaccccatctcaaaaaaaaaaaaaaaaaaagcaaattccagggcctgaattgctgaatcagaaactctgggggtgggatccagtgggtgggctgtgctttaacaaatgctccaggtgattctgatgcagcctcaagcttgagaaacatggctttaattggtgtgacagtcatgtcaccyggaagtcattcacttaatctkcatcatagcctatgagatagatgccattaatgatctgatgttacatagtgatccatgaggcatatggaggctatgcagctcagctaaggtcacacgttagtcagtggctcacttggctctgaacccaagcaaccgcgcacctgaggggaggtgagtcggagaggtggacacgcagggcctcacaggctagggcttcccagattttgctgtgcaaatcatttggggatctcattaacaatcaggttggaattcatagatccagggtacagcctgagattctacatgtcttaaaagctcccctggtagggtggccacgcatccaggtttgactgggacagagggttctagggcgtggggctttcagtgctgtagctgggcaaacctggacaagctgtcaccaagccccaggtgcttctgaccacactgtcagatgcaaaacacagacccacaagatgaggagtttgggttgtattcaaaygtgatgaaagtgttgagagcatgagagtgacatcatctgctttatattttacatatatatatattttcttagaaacaagatctctctctgtctcccagactggagtgcagtggcacaatcatggcttactgcaacctcaacctcctggcttcaagcaaccctcccacctcagcctcccgagtagctgggattataggcatgcaccaccacacctggctaatttttgtatttttagtagagatggggcttcaccatgttgaccaggctggactcgaactcctgagctcaagaaatctgctcagctcagcctcccaaactgctgggattacaggtatgagccacagcctgctttagaggctgggagaccaatcaaaaaagttttaacaacccaggcagaagccaggggtggccagaagatagagagagggagaaaatgtagggtatattttggaagactgaaggaaaaccragaggcaaggatgaatcctaatatttcacttcaggctcaagcttttttttttaaaagagcaagtttagaagaaaaaaaaaatgagagccaggaaagacagtgagacacagaatgagagagaaagactcaggaaaattattgaatagaatgatgtgtgatttttttttctgtaggaaaaaaactcatttaccaattaaagtatgacctagaatttgtaatgcaggggtggggtctctaaaacatcccaaacagcctaagttagtaaagagctttgaagagtaaatgtgcctactatggactgaagtgtgtccctcatccccaaaattcatatgtcagagtcctaacccccaaagggatgttatttggaaaagggtctttggaaggcaattaggttcagtggggtcatgagggtggggtcctcgtaatgaaattagtgcccttattagacaccaaagagcttgtttctctctctccacccgtacacaccaaagaaaggccatgtgaggacacaatgagaaagcagctatctgcaatccaaggagagagccctcaccacactctgaccctaccagaaccttgatcttggacttccagtctccagaattgtgagaaataaattcckgttgtttaagccacccagtcgatggaattttgttaagacagtgcctattaacatgttcatctcttttgaaaagccacaatgcagcatgatgcattagacaactggtcttgaggcaaaagttaagggacatcggtaggaccatgacaaagatccaagccttgggactagggcccrtcactcagggttccaaagtcctgacataactgaatggtatccaactcaagcccattcacatctcagcttcccaccttgctgtctgttactcaacctctctgagcctcagtttccttgtctgtaaaatgagaataataacatgtccctaatggacttatgatcataacatgaggtgatgtgtgtaaaatgcctgacacttactagttgttccgtcatctctttccctctttcctcttctacgtgcaagataattttatttctaacaaggcaggaaaaatcaaagacctaaataagtaaactctcccaataagtggtacatgactcatgaattcacattcatcctccctgaccatggatacatgacttggtctttgtgtgccttgctgtcctctgggggatacagcacctgccttgcagggttattgtgaggaatgaatgagatacatgtggcatgcttagcaccatgtctgacacacttaaggaatgcaagcaagtaccattgccactgttgctgtttggtatgtgggtcttttcaatcctgcacatttctaggtaattaggcccaaaatgcgagagaaataaaagagattcagagacagscaagagacacgtggagccccaatcctagggcaatggcttggcaaataaaagggtgccacacttgtctagattgccctccacagctttctctggctgggttttatgactctgtcttatttccacaattgcaccagaagttctcccagggctgagaccacgttatccctttctggaggcccagttacacttctcccaacaactgggtgcatgtacagtaagtgcttaataaatattcataatgagcctgttcagaaggatctgtgtcccatatctaagatttagccaaggatatgccagggccaggtcaggctctgatagttactgctgatgccaatgacaccccacaggcagttagcttcacagtggtggcaaagtcccatcacatgggctcagatggaaccatgattcagatgagtcatctgtggtcacagacatgcctgtgggcccaaatgggacagagatgggacattagtgctcacaggcatggtgccaaacattcacattatctcatttaagactcacagcaatcccatgaagtcaggaggattattacccccgttttatagatgaggcaactaagaagcagaagtgtaggtaagtggcccacatttgtaccactggaagatggcagattgccagggtcaccattcacaccctggactgaccaactccwcagccattccctcagccacagggtcaaggatgtagatgacctttgaggccagaaaatgagccccaagtatcccctgcaaggaccagagcaactctatggattctttgctatataatctgaaaactgtctagttaaataataatttctctaaagaacacctgttactagtttccaaatttactctttgagaaggaagaagcagcccaatttcccagaaagagctctgtatctaaactttcctctgtctcccctaataacaaaggctggatttctggtgtcaagtttaggtacgcagttggctgtgtaggctttatggcttttcagtcacctttcagagtaatctaaaatttctaagcttgtttcaaaggtaattttcactctatctcttaaagcttttggccgccctcaagccatatgttagaggacaagagatgtcagaagactaacatctgttagatctttcccaacagtgtggcaatgacatcatatgcttcttttagataatttgcacattatcagactaattttcagattatctaatcagcagacattacccttaatcaacttggttctcccctttcagctctgcagagtacaacatgccctccaaaggcgtgctagagctggggctcttttttctctcaacagaggtgaaaagcctaactttgcaccaggcataccacccttgcacaaaaggctgagacctccaggaacctagaagaacccatcttcaattccacagacttgaaaaatcagctggaaatacattttatagactcatatttttttaaatttccctcttaggagctctgagtaygctatagagagtatgttatatttacttatgctattaaataaaagagatacaacatataacaataagactccaaacagatgttttttaagttatttgtttttgccttctagtaattgctactctggcttcccactgtctataggaataaagactacacagaggggcatagaagacgcttcccactgtggcccctgattacatttccatctttcctctgcatcccctaaatccaacattactatcagacccaaagacttccaattgtctgaatgtgccatgctatctcatacctgcctgccttcatgtacagttccctctacctgggaagccctctccctcctaagaaattccttctcattctccaatggctaacttgaatgtcacctcttcrgtgaagcctttgcaaaccccctaatgcagtagtcctaaagcttgagtatgcaccagaatgccctggagagctttgtaagacccagactgctggcccccatccttggagtctctgtttcaggacatccagtagaacctgagaatctacattttcaacaaggtcccaagggatgctaatgccacacttggaataccactgccctaaggcatagaaagtaccctgtgcccttgagtcctgaactccctcacggttctgtacacaccccattgcacactcccactcaagactgtgagctcaaagacagggctgagtcctatttatgcctgtcctccctagtcccagcatatagacaatattcaatacatggttattacatggatgggtggatggatagatggacagatgagatggatgatggatggatggatggatggatggatggatggatggatgggtgggtgggtgggtgtgtgggtggatggatggatggatggatgggatggatggatgggtggatgggtgggtggatgagtgggtgggtgggtgggtggatggatgggtgggtgggtgggtgggtgggtgggtggatggatcgatgacgtatacacggatggatggatgcatggatggattagactgaatttatttacacagcttttcatccaggcccaggacttcataaatgtctatcctcactctaaaaattacctcaaaaacatcatctataatcaattcccactgtgcagagaaggtaaaaagaagttcaaagagtttaacatcacaagcctatgttaagggggttttgaattctagtccagagctctttctgctactctaccccactggggctccctaccaaggctgcatttaagtagtcacaatggtatgcttctgagtgtatctttcagagtcctatcctccccagctgccctcccttcattcatgtatgtgtacatctatgtgtaggtgtatgtgtgtgtacatatgcatgtgcacacacacagtcatttatttcatttgcaaaaagtaggtgaaggtggtaaaagaaatggaggccgaagaggcacccagcctcatgcagggagagggtgggatgcagcccacatgcagaggaccccatcagaaaagcactatttcccagaggggagtgtttgagctccaagcatccctggcttcctgtagttgaggcagagaggcaagggcacacaggaaaggggacaaacgtacaggaaacacaagaaatgtatactcaggagaaaatgagagactgagggagaaacaaaggcgygagagcatcagcttgggggccaggcgatcaggagtggcagtggattgctgagcttgcagcacagggcagcatgggcgggggcggggaaggtcagcgccggctccagcagtccactctgccctttcagcagcagcaccaggcgcgggatgagccatgggctctgctgaagacaaagctggggggcgatagagcaagcgacagcaggaggaccaaagtcaaaaggtcgctactgctgcaggtggtgcaaacccagctgcccttggccctgcaaaccctgtgtctgtaaggctgtttttccattaggcctccgctcacatgcagcttgggtcaccctgcagctctgctaaagggggaaaaagtcagcatttccacttcactggtgtccagaccttctcctgggggagccgcagattagcctcttggattaagctctcctacctgcccctcccctccaaaagcctcaccaagggaggatcacgaagctgagaccttaggatgctgccgagctgtcacttccaattcagcacacagccccagtagcatttaggggcaggatggatgggagccaccccctatccccaaacagtgggagcagctaatgactaggtattaatgatgctggcaattagtgctcacaagaaaatagtcggggggctgctcaccaggggaatgtgggagggagcagagcacacattcggggcggcgagcaagtcagcggcgtgtgtggtgcagagaacctgggacgaccagctgcctcatgggtttgtccagagaaattgggggtgggggaaaggatgttttctgcaggcactaaaagcctttctgctgtaccctccccactagcaaaactgggttaatcacagagttttcraggagggcactgtgagatgtcactaaaaaggtgtttgtgaggattctggaaccttcttcgtgtggggaggccccggatccrcctgggaatacctattattttctaggaggttttaaacccttggccaggcaaatgatcctttttgaagagcccactttctcatcagcagggtgagaaagagaaaaaggggagggggagttggagtgtgtgccactcactgacaagcccacagaggtgagaacaagccacccatgaaatttcgtaggcagacgtctccacatctccacgtagggcgaggggagacaggcacagcttctttcccaagcaaggctgtgtggcctcaaggggagaacactagaaggccaaacacacccgcccacgagggctcgtgagaagatccacacccgagtgcttgtctcagaagtcaaccaaccctgaggggaccacagggatcactggggagactgcctccttctacttcgggtctgcagcacacctccccgtgcagccacaaacaccaagcacatggacggacacatatgcacatgtgcacacacgcatgcacacatatacaaaaacacacacacacgcaggtacacacacaatacacatgcacacaaacaagcacacacatgcacaaacaacacgcacacacatgcacgcacacacacaamgtacatacacaacacgtatacacacgcacacacaacatgcacgcacacacacacacatacacgcacacacasgcatagacacacacacacccggctcataatgaggctacaggagaaccaaggaaaatgagacacagacagacaagaagmattccaaaccccagggcatgaataaaggaacaaaatggcctgacatttgagaagagatataaggagataagctagcacaggggagtgagaaataaggttaccaagctaataaacactttagagagcgcgacaatggcgaagaaacacttttcagggagcaaccaaaatcaaaggagattcttctcagcctcctcatggtgggagacaacagctccgtgtgacctcttggtcacttagaccagggaaaagaggagagaaagggaaatgcaagtattggctgcctcagtacaggtcagtatcttttcctttttgaaagacaagggtgactggaccaaggaaagctcttcccagagagaagacctcagtgttggagctcctcaggccctggcaaggagaggcgggcaaggctcggggggcacctcctgctctgctgttcaggttctgtccaggtgacaacagcaggtgagaaagcaagggtctgtcgcactaaaggcttgcaccttggaagtgagcaaaaattcaagaaggtgctgaaggctgaattgcatcccctccccactcccaaattcctatgttgaaagcgtaacccatggtacctcatactgtgacttggtttggaagtagggtcctcaaagaggcatttaaagaggtaaagttaaaatgggcttgtcaggatagaccctaatatccaatctgacaggtgtccttacaagaagaggaaatgggctgggcgtggtggctcacacctataatcccagccctttgggaagccaaggcaggcggatcacgaggtcaagagatcgagaccatcctggccaacgtggtgaaaccctgtctctactaaaaatacaaaaattagctgggggtggtgatgagtgcctatagtcccaactgcttgggaggctgaggcaggagaatcgcttgaacctggaaggcagaggttgcagtgagccaagatcacgccactgtactccagcctggcgacagagaaagactccgtctcagaaaaaaaaaaaagaagaagaggaaatgtggacacaaaagcagatgccacagcacgcatgcacagagggataactgtgcgagcggacaggagaaggcagcatctgcaagtcaaggagaggaaaccaaccctgccagcaccgtgaccttggacctccagcctccagaactgtgagaaaattaatttctgtggtttaagccaccccatctgtggggttttcttatgagaaccctagcaaacccataaagaaggcaatattacgaggggaaagtggggtggaggttaagggagaccccacactaatctgaasaatggtcttggccacaggtgtgttctttatttcaaatctttggtgaaagtggccagtggacatcagttgactaagtcgttggctaacacgcatcctctaatcctagagtctgaatattttaaacgtctgatccctttcactgcattgagttgttcactttcagaacacctaccaccaaatcttctgaacaaaatgaaaaacacatggcctgtccacgaatattcttcactgagagatctcagtgtggcccacatcttcaagcaggctctaaagattccattatcccatttccatgttgagatttctgcaggcccagagaccataagggatgttctagaggaaagtcaaatggaaaatgctaagcccctttggattccctaattcataattggaagttgaggtaagaaagcagagaaacggaaacacaaaatcttcaggatcattttgggtcttgagagcccaacatcccaaacgacaaatccacccagatcacatttgccatttgaatgctgaagcaaagaacatggggtctccaggcagcatttctaaggcaggagagccctgtaccaaaatgtgatcccctcccctctacaacaaaaccacagcaatagataagaatattctaaggcacttcrtagccaagcaggcatttcgaatgtgtgtctgaactgacacacctattacctatgcccaacccagtctgagtggctggctcttcaggagtgagggaaaagagttgtaggtctggcatctgacagtggccaggtaaggactttctcttctgcttaacactcaccttccttcctctgggagcagagcagggtgtgtgagcccagccctgctattgctaagcctagggttgggctgagctgcaggggcngctggctggctggctgaaagggccaacacactacagcacattgagaccactcaacggttgctaccagaagatgccagcagtgagaaaaaggaacaaggaacgctccccagcctgtctaacccacttcttcactgccccaacctaacaagtaggcactcacgcctgtggttctcatttctgtggttgggtggggaccgagtctcctggtcttgagcttcatccccctcctcgctggccaggtgagtgtgagcatagtggtagctgagccccggtcggttcttgtagcgcttgccacagactagagaggaaaagaggaaaaaagggagagatacaaatattagcaacctgtgcagccaccgctatcattctcccagacagtgatcccatccatccaccccagagccaggcttcccttaaaactgtctcccatcccaacatccctttcccccacccaacagaaccaacacccttgtaacaactcaggtcatggaaagaaaaactgtaaaagtaaaatatgaggttaagagctgtgtgagcactccaccgtttctagctgtgagacccagggcaagtcacttgacctctctgtgcctcagtttcttccgagataaaatgggaacaataacagtacttacctcacagggtcattgtgataagtttatctctatgcaaagtacttaaaacaatatcaggcactttgtgagggtaattgttatgacgttgaattcaaagggcactgggaatctacccaatccaacatcccatgacacagatgaggcaagtgagacccagcaacaccaagtgacttgcccaggagcacacaactagtgtggcagagccaccagaacccatgtctcctgggttcctgtgcactgtcccttccaccaccccatggttggcctctgcaagaagtagaaaagttttatctggataatccttttgatgtctcacccagcgattttgtgccagaaacacatgctgcacttctaccatgaacgccatggagttaaagcatccttggtgagtgtagtcaccaagagcttgtgcccctgatgccccagggcagccaaatctgtaaaaggtgctctcacaagtactacctctcaaatggggcagtttgagccaagggcagcgagcaatcgaaatgtgccttcttggagccaggaagaaagggcagcagttctgttggttagatgctcagttcctgggaagcagaagtctggctaaatggctcaaggtcacactaccaccctcaacctccccacatagggatcattatctcggcccctagggggacggcattgctggtagcagaaacctcgagagtcttcccagtgaaatgtccatgccaaccttctatgcttgtcccccagcctgggtccccatcagagcaaaccaacctgctctctgctggagtgcctgaaagttacaaattctaaaagacttctcccttgtgctgacatgaccacgtcatacaaggaagcataaatgcttcacaaggtgggaagagcacaactttagcatcaggcctgggttcaaatcccagttccagctgctgaggttcactggctgtgtggtcctgagagtatacagaagtgctgtcatccagtcatcttatccaatacccttattacttctgatagagtttctcttcctaccagattctcttggggtttttcagtagacaaacattggccaaaataatgtcacctcttcttccccatatttacataaactattttatcttagcttagatcatttgtaagaaccaccaaaacaatatcttcaaatggcaaaagcaagcatttccaatgttaatgaaggtggatttagtgtttcactgtttagaacgrtgtatctggctaatttttagtctttaccaaatttaagtagttcttcttattcctgytatagagttttattataggagaattttatcaactaccctttcagcatctactataatatgattctcctttagttggttgataaggtaaattacgttgatttcctaatatttcctattattgaaccattcttgcattcctagaatgcactccatttggtcagagtatattatttatttgatatactgctgcattctgctttctaatactgcatcttgaatctgtactaagacttgagctcaatctataatttttggactatcttttattaggtttcaattttatggtgatgttgatttctaaaaattaactgaagagttttgctgcatgaaattggacaagctgcagctctgtgccttttcttttatctgaaaatgaggataacagtacttatcttgcaggatgggtaaaggtattataaatagcatttgcaagcagctctctcaatacccagcacataatagatgttcaataaatggtaaatgaggggcaagggctgtcagcattttttgctgcatcttaggtactggatcttcctgaaaagagggactttgacccttgcctcatattataaaatctggcaaytggttggacttctttgttaaggtaagatgagagtctgaaattcaagttggtgacccagtgactataaattcaaggcccaatgtttagctcccacttataagtagaacatatggtatttgattttctgtttctgcattaattcacttaggataatggcctccagctgcatccatgttgcaaaggacatgattttgttctttttatggctgtgtaatattccacggaatatcctgaacactgggtacacacagacgtaaagatggaaacaacagatgctggggactccaaaagggggaagggaaggaagagggcaaggcttgaaaacctacctattgggtactatgttcactaattggatgatgggtttaatagaagcccaaaccttagcattatgtaatatatgcatgtaacaaacctgaatctaaaaaaataaaaaattaaaataaataggcctatcattggctacttacattcatatattctctcttcctctctctcataaatattgkaaaaaaaataaaattaaaataaaataaaatagtgctatgcatcttaattccatgtgactcaggaagctggacccaaagaggcccctgaggtgcactctggatctgcttgtggctttttctatttagctttttagataatctgaagttaatacacagcaaattatggggtcattgcatataaatccatttagttgccaggcatactgttagtaaggaataaatgcttattaaaagtaatgataatgatatcagtatttacacaaagaggcctcagccacctctgcagatccccagtataaactcacagcatttcacttgtgccattttgttatgtcaatcatcactgttgcttaatcacacaatttcaggatcttaatggtcattttgtctatctagagaagtgttttattcccaataactstagaaggctgttctggacaactccattgatagggaactcactaccagtcaaagcaggcatttctcctttagactccttgaattatggctatgtctgcactatgtctcttaaggacagtttcatatcaatttcatcttgatatcaacaactccaccttatatgttgacatatacatactacgccttcaaaacatatttgttgagtggctcatgaatgaatacagaaccattttgtgggaaggccaggagatgggcgaagaggcaarttgyagaatctaatccttctacccacattaagctcagactaattgttcttaaaagtctacaaaaccaaacctaagcaaaaagctccctctatctccttccccaacatggtagaaagtaataatgtttagagcaaatccttttgctagaacagagattctcaaacagtggtccccagaccagcaccatccacatctcctggcaacctgttagagatgcaaactcttgggctccaccccagactgactgaatcagaaactctgggggtggggcccagtgatctagatttttaaaagccctctaggtgattctgatgcacactaaagtttgagaaccactgggctagaaggctggatctatttaggcttggctccaccaaccctatgtccacatgcccttcttgatggatggccgtagcaggcaggggcaggataggcagccttgagacctttgttcagttattagcagttattagcagaatcaggaccagacaatacatggaggtcccagaagccagacttcttcatgaagagccctctggatggagctccatttttaaccgggtatttgtaccatgtcattcttctatcaccaggtcttcaattcaagaaatatttattagacacctaatatgtgccccaccctgtgccacaagaaggacaaaaatgaacaagccccagacccctccatggaggaggtcgcagtctagcagagatctgcatgtaaacaagccagggggaggtgggttggatacagggtgagaccgtgccaggcaaagagggacatcaaagaggggacaggaaactggcttgagtgagtagggtagggcttcccagagaaggagcccctgacatgagcaggacttcagcaggcaaagggggctcaaagcacatgcagttatcacctctgcaaactgcgagaagtctaacaaagttgaagaggtggagcggtgggggtggatgtgaggaagactaacaggagaggaagctgagcaaggctttatcctgacaatggggcagccaggagaggattctatcctgaggaccaagttaagcagactgacatgttagaaatactgcttaagattgtagggcagaatatggatttgaaggtrgcgaggggctatttcaattgtttacctgtgcaacaatgaggacttgtgcatggagaggaaaaatggggtgggagaggggttaatgagagaacttggtggaaaagggagtgagtaagaaagcaaggaggaacccagaaagactaacatggccttcctggccaggcctgacccagccccacccacctctccagcctcttctgacaccacgttctgcctccacacagcccttctgctcgctggccttttcgtttattatagatttctcttcccaccacagagtcttcacacaagctctttcctctgcctagaatgtccccatccccaatttgcctgattaaggtctaatcatccctctgatctcagttcaaatgtcctcccccagggaagtctttcaaatcaaaattacaaccttagttttttgccttcctaggactaatcacgtgtcaatacagacagtccgcaatttacaatgctttgacttttgatttttcagctttacaatggtgtgaaagcaatacacattcgatagaaaccatacttcaaggacctatacagctgttctgtttttcagttcagtattcaataaattacatgagatattcaatgctttattctaaaataggctttgtgttagatgatgttgcccaactgtaggctaatgtatattttcaaagtaggctagggctgggcatggtggcttacacctctaataccagcactttgaggggccaaggtgggaggatcccttgtgcccaggagttgaagaccagcctaggcaacatggtctctacaaaaaatacaaaaattacaaaaaatacaaaaattagccacgtgtggtggtgcgcacctatagtcccagctactcaggaggctgtggtgggaagatcacttgagcccaggaagcagaggttgtagttagctgagatcacaccacggcactctagcctgggtgacagagcaagaaaaaacataaaataaaaaagtaggctaggctacactatggtttagtaggtttggtaggttaggtgtaagacatgcattttcgacttaggatattttcaacttatgatgggtttgccaggacatagcactaccataagtggatgagcatctgtatgcatctctcccactggcagcaagcatggcaggtcctgtgtatccgcngtgctgtgtcccgatgaccagcacagggcctcacttgtggcaggtgctcaatgtcagctacggaaagcaaagagatgcacatgtttctgacgtgggcaactgggtagaaggatgaaggaggaaaaccagatttaaagaaggaagaaaatgagttgagttcacctaaagcttgggaaagagacgtagattttggagctggcagggtggcaatggatgttataagtatggggaaaagtgtcaggaagagactgtggagagagaaaagaggtgcctacacaggatagaactcagaaaacaccaggatcttaagaaactggtggaaaaagagaaactgattttttaaaaatttgtttagaaagggttgagtgtggtggctcatgcttataatcccagcactttgggaggctgaggcaggaggatcacttgaggccagaagttcaacacccatctgggcaacatagcaaggccccatctctgcaaaagacaattcaagattagccaggtgtagtggcatgctcctgtagtcccagctacttaagaggctgaggtgggaggatcacttgagcccaggaggtcgagggtgcagtgagccatgattgtgccactgcactccagcctgggtgacagagattctgtctcaaaaaaaaaaaaaaaaaaaaaaattagtaattgttaagaaaaactcacacaggagtgagcaacataagccaaaggaacagggtttcaagacgacagtaacaatgacaccaccagtcacaggtcctgycaacagctattgagtgtttaccacggaccaggcccactccaagtgcttcaagtaaattgactcacagcaacctgcatccccattttaaagaaagatgaggagattctgcaccgaggcagagccacagtaataaattaatcagatgcctgagaagggtcaagaaggttggagactaagagaccactggatttggaaattgggaagttgccttagcaagaagagaatccacaaagtcgaggagcacaactgcagggtgctccaagaaatgaggaagtgctgatggggccagctgtgggaggaggaaagagggaggttggtgggtggaggggagcttaggatcagggcagaccagggtggagcctgtgttttaccagcctattctgactcccaagtcttagtccttggaatgatttcatcataggggcaagaggaagagtgaagacttccaagagttattttggttggattgcatcaggatgaaactgcttcatyacaatggaaagaaacgtcttgaaatcctgctttgactggcttagaaaagccagcactgtttctccttctgtgtttaatcatgtcttcctgtcactgcaaacaccatgggccagcttcgtgagcctgtgacctgtgcttccagacagggtccgagttcagaaaggccccacacttggtttaatgccctgctgttggcatcttgaaattcttaatatttattgaacaagggcccccgcattttcattttgcagtggaccctacaaatcacgtagccagttctagaagtctgttgggttcagagtggagatctgagactaagttactccaaatagctgacctgatagtctgagagctgccaaggtgaacccaggtcccaaccagtcctgagtcaggcataaaattcccttctgagataatcttgaaagtctggccagagtgattagctgctcagtagtcatcatctcagtgccatcaaccacccaggcctggcttctagatcggctctgccctcagagaggcagaatctgcagcaggtaagtgggcaggctggatctgaactgcctgggttcaagtcccagctctgctgttgactctgtgatcttgggcaagttactaatcctctctgtgcctcagcatcctctctgtaaaacaaggtggatcatgacagcacacctgctccccgcggtgagacccatatgagagaatgtatttaaaacaaagcccagctcatggggagtcgtggctgttctcagctgctctcatcaccactgctgtcaaagtggcccaacaaagagaataaaccccaaagtggggagttatttctcctctgaagtctggagtggaatagcaaggaaaagagggtgggaaaagaaacattttgaaaataaagtactggaaccatctgctctccttttatcatgtcggcattctcactctggaaatatctgtcgtgcggaatcagcctgagccccaggagcgctgaagcagcagagagggtcatgccccatcttcccactccagtctccttccccgggggcaagcgcttttgcaccatgcacctctgaagccaccacccctgggaccagtcagccctgcctgtgcacgacctaaggtccttcttttcaccttggcaagcgtgcacctggattttgtgttcctggcatggtgcacatggagagcagtggctgtgacaataagggaggtccagcttgccttctctttctccttccccctggggcggatccatctgtcaagstgcagaaggagtgtttgcccacttcccaatccagaactggattctgcatgcaggacctcctgtctggagttatggatgccttcagtgccgctccaaaatatttactgcacgccccctgccctccttcaaacctaccccactcctagtctgggcgggggtcggggggagcagggaggaggaggaatcaggggcagcttgtgtgaacaaagccgctgcagcagacagcagaatccttcctgccggggagaagcggctgccttccccactgataacttaatgactctggcacattttcatcagcccaacttggagcacacagtgggaatctgagccagtggtttccgagagactgaaagcagtgactgaaggcaattacaggatgagcatcccagagacaaagcctgggccctgggagtcaccagccagtcaccagccacagctcattcccggctctgccccgtggcactgacatacaaccctgaggacaccgcttccttctctctgcagctggacttcctcatctgtcacccagaccccaccatgcctgtcatctgccgatgcctccaaggcatcacacctaccatcaggcagcacccattcccatgcagaatctcacagctcaggaggcaaggatccccattccacagatgaagaaactgagtctgggggagtttaagcaattctctggatggcacagccagagtttgagccctggtctgtctgcccttgaagcacgtgactgaaaggtgcgctggtgagtctctgcttggcactgcctccctccccacccaccccaacggcctggggctgactggcgtggcctgcttcacccatgctcccttgctctcggcaagaaggaggcaccagcaggagaacggagggtgggaarraaaacacgtggggacttgggccctgccctgcctgggcactgtgctatacaggggctgtataggggcccacctccaagactccagtcctgcctggctctgggaaccccatgtctcccctgctccttggagctggggatagggagggcttcccgctctccctgtcagcaccttcatcttgcccacaccttcataatcactctggcatcaaattcccttccatccagcccttctgagtggaatcccacatcctgccggataccatttggacacatattcacaccctaccagaccggctcgtagaagtttggggccaccaacacctcccaacgaccctccatcttctctctgcagaaccatctgggggatggaggcattcctacaaccaattcccccgagcagggagaagccccaactgagaaaagccctgtgtgactcccagatacaaactcagatcgggataaagcccaggaggtacttccaaaagccacctgctcagactgggtacrcagggtacagktgttcatcccacagccacttcaactggccaggcttttctcaaaagccaacggtggatccaacccccaggtgggcttctcctccctcccctgcccttgaagttcgaggccagcagactcggtggccttctagagaccgggggtctggctctgggtctgatactaacccgctatgcacccttggacaaattcatacctttctgggtcttgatttttcttatctgcagaatatgggggttggatcagatgatctctaagtcctttgcattctagcacttcacaackctctgtaggtcctgaagctattatctcctcaactgtgataggaaaatgatgaggctcccagaggctggctacatccacctccccccaccccaccctgcacgattggcagctgccgtcccgtggcttcataccttctttcaggccacccttgatgcttattttaagctgaattcctttggatggagacacaggggattgggggtaggggtggggtaaaacaccctgatttttcacagccacatttcttggggcctggtggtgacccaggatctatcaaactccagtgacccaaaagtcctgtgtcttcatcaagggagagtgtcctgcttattttgggaatttactagatgtgaggaagaacagagacaagcaaccagactctcgtttcaaaatattctatcacctgatttctggatcctcagcagggaaatgcagaaaccccccaaaaccaaagcactccatgtgttatgggaatgtttcctgccctgctgagaagccgggtaacagaatgcaggtgaactcgggagtctgccttcttgggtcagctgatttgcaatgtgaccttgggcaagtgacttagtctctctcagcctcggtttcctcgtctgtaaaacaagggcaataacagtttgtagctcatgggggaggtgtgagaactgcaggagttcatcttcttacaatgctcagcccagtgcctggcacacagcacatgttcaacaaacatcagctatttttgatcattcatttaacttgatcagacaactcccttagatcctgcagcagctagggcacagaacacaactggggccccagcttaggtgttaaataagtaccttttcttgattcagtataaagaaaataaacatttattgaaaatatctatgaaccaagcagtgagctaattgtttttacacaatttctcattgaaccctcttggaaacccactaaggttaatattattgtcctcacctaacagaccagaaaacaaaggctcaaagtggttttgtgatttgcctgaggtcatggctaggaagtgacctggtaaagattcaaatcctagctttctgactccggagccaccttcttccaactggcatccctttcagggtggtgtctttgattcctgattctagtgagtcctgcgttagcatgtccttaatgagcttaaattaagagtgaaactgaattctcttttcaattgtacaataaaaataatttaaataataaatgtcattgtcaacatttctggggaaggtaaaaagagaaaggtcaaaaatcagacctgattaccctaagctgaggcagcccccaggcatctgggaatcctgctagcatcctctctctcaatatctctgtacacctcccatgccaggacatcagtgcggcctcaaatgctgagcaggttttatttgtgagttccaggctatccagtgtgattccccaccccctgcctgaggtaggccttcttccacctacaatgtcagtgtaagctcctcagtgccttagaggaaacaacaactgtccattagcatctgttaagacgtttctgcctggattcctgccatttccaccaactcatatgtcagtttcatcacactcccaaaattacttccccttttaggatattccagttaagctaccccttttgtctcaatgacccaagtgcaagatgtcaagagtcatcactgccacctccctctctcctctcctgctctccacatcctgtccatcatctgccgggttctgtgaatttctctttcattaagtcttcttcatctgccccgtctatttcactgctgctatcaccaccatccagatttcatgtcttctcctagctgactagaaaaggctcttctcggtcatcaggcttcaggctttcctccctgaacaccgaatcctacagaycaaccttcctagagatgtccctaggattgtcatgaattaccacggaccatgcaggccaacctctaagccaggggtccccaaccccccgggctatagactgacacctggactgcacagcaggatgtgagtggcgggcaggcaagagaaacttcatctgtatttacagctgctcctcatcactcgcattaccacctgagctccaccttctgtctgatcagattagatgtcacackggattctaacaggagcacaaaccctactgcaaactgcacatgcaagagatctaggttgcacactccttatgagaatctaatgcctgatgatctgtcactgtctcccatcacccccagatgggaccatctagttgcaggaaaacaagctcagctcagagctcccactgactctacattatggtgagctgaataattatttcattatatattacaatgtaataatcatagaaataaagggcacaataagtgtaatgtgctcaaatcatcccaaaacctgccctccgcccctggtccgtggaaaaattttcttccatgagtccctggtgccaaaaaacttgggtactgtggctctaagcacctcagcctgatgttcccagcaaccctsgtctaactctgtgcccccaatctccctacccacatgctctgggttagtcgagctgagccttcttcttccctggtatgcacatcccacattcccttctccagacattcatcaacagtttggaagcaccactgtgctggggctgggctgcaagttgattctggcctgggccctgccctcagaaggctcacagtccagcctgagggagcagagaaacaaactgtcatcacacaatgtgggaggcagcctaccaggaggtaggcacaaggtaccagcagcttccagaaagggacagtgatagtgtgtgtggtgggggagggaaggagaatgagagagagaaaaaaaaagagagagagagagatgaatgactgggatcaaatcttggctctagcatttattcactatgtgacctcaggaaagttaattaacccttcctctccccagtttccttatctgtaggatagagatgaccaaagcatccatttcatagcacttttgtgggagttaaagagttaatatagatgaagccaacagaatattccaggtctataatataagtcaacaaacttcagcattatcattattacctcttccccctacccctgggcacacccatccacccctgggggccaatatcaattccatccatgcgccctaagggccttcttggcatcccggggctgcactctctgacacagcagcccctcttcrtgtgaccactccctgccctgttccttcagtgctcactgtcccctcaattaaataccgccccggcagtgtgctatctcctgcacaatatcagcctttctccttccaagcatattggagaaagagaaaataagaccaaggtgggggaaacctttgtcaagcacatgccacgtgcaaagctttttacatacatcatcacagtcagctttcccactgtgccccatccccaccatacaccggaggacatggagactcctacagcaaaatgactttctcgatgtcacagataacaagcagcagaaccactccaaagtcagggcacatcctgcttcacccagctctctgcaacctggcagacccatcaggctccttgctttcctatactccccaccatgactcaaaataagagagatcaaaggccatgcaccaggccctgcagcctcacaactgtacttctaggaaacaataaagcattatgcaaaggtatagctggaacagtgcttttttttttcttttttcttttattattattatactttaagttttagggtacatgtgtacaatgtgcaggttagttacatatgtatacatgtgccatgctggtgtgctgcacccattaactcgtcatttagcattaggtatatctcctaaagctatccctaccccctcccccaaccccacaacagtccccagaatgtgatgttccccttcctgtgtccatgtgttctcattgttcaattcccacctatgagtgagaatatgcggtgtttggttttttgttcttgcgatagtttactgagaatgatggtttccaatttcatccatgtccctacaaaggacatgaactcatcattttttatggctgcatagtattccatggtgtacatgtgccacattttcttaatccagtctatcattgttggacatttgggttgattccaagtctttgctattgtgaatagtgccgcaataaacatacgtgtgcatgtgtctttatagcagcatgatttatagtcctttgggtatatacccagtaatgggatggctgggtcaaatggtatttctagttctagatccctgaggaatcaccacactgacttccacartggttgaactagtttacaggggcagtgcttttaatagtaaacagatattagactgtctaaacatctaacagtagaacattgagcaaattacgagacatgtccataagctgtggcacatctgcataatggaacactatatagccctaaaaactatgtcataaaatctatttattgacacagaaagatgttcctgatgtatcactgagtggggcagmggggckttaaaatggtacgtatcatttcttagtcgtcttctgtgtgcgtgtgtgtgtgtgtgtgtgtatgtgtgtatagacagagacagaattaatcctagaatggaatacagcaaaacaaatacagcaaaaaattatctccaaggagtgagattatgggtcatttttgttttttcctctatttttttttttttgagactgcgttttgctctgtcatccaggctggagtgcaatggcgcaagctcagctcactgcaacctctgctttgcgtatctgtaattcctgattattctgcaatgaacaaatactatttccatagaaaaagttattttaaaaaaataatgaaaagcacctctacaatggttaatatctaccctattatgggtcatctacacagaaataggaattgtcatgaagtgtgcatcaagaaacagttagtggagagcaaggttgtgactgaatagaaaataactccagagggtgtgggtcacagcccagagaaggcaggtgtaggttagaaggtcaaatgccaagatgcgagccctggaggagaggaggcagagacaggagggtctagggacagcaaagagaaacttcaccctctccccagccctgcctctggccagtcctgccggaacacctgcaacctgtgtccatgacacaatggcatttaaatatttaaacagacccagctttgctggaacggcgcactcagtctccagggatcaatcccatgccacaagccccgctccacaaatcaagtttctgggggcaccgagcctttcctcccctccccgatcctacccccatccaaggacctgcaagacaactgagtgatgagcccagcttcccttccgcgacaaaggcagtgagcctgaaggccgcgttattggcttttccactgcagcttgaagcgaaaagcacgtgagccttaaagaatatgygccttaatgccctcaaaaaaatttttttcttagcaaaactgcaagagtcatctaactctccctgctgcactcaggtaggggtaaaaccagggtagtttgaaagaggttgaggtcaagcagattttctgggactgccttgggctcaagcttttgtctgtccagtcagcagatccacccatcccatcgcacctcttggcctgtggcacagtttcccgtggtattccccaatccactgctcccttcatgtcctccagacatcttgcctccctagtaaagagcatcattgttaagctgctgcctgggaagaaaggcgccactgtgtggggaaggagtgctgatcagggcagtccggaggcccaaaggaggagccatcccctcacggacaaaggaggaaaccagtgccatagcaactgaggtgtagaaccaggactaaacgtccagcctgctcctcccatcagcctgatacccttctctctgaagtacaccactgccaagaaacaagagactttagaacgggaagagaccctagaccctattctgatactacccccactgggtgtggcaacacactccccgactgggtttctagaagggaggcaacagggtgaagcggccacacagctgaagacgcacatctgtagggtggaggtggtagagaacagagactttgctgagacagaggtggccttgagagggcccgctcctggtgtgtgacacctgacgtgactcaggagtgagtcatgcttctaggagggctttagccatgtctatttgccttttgtcactaatctagcctaatgccgtagttggggggcagtgattttaatagatttaaatttaaaagactggaaatcatataattccttccatcctacttcaattgtaactactacctgactccagcctgcccgcctgatgcctagaaattgcccatcgacagcggccagggcttcacctcataagtaagttgtgcgttctcattaattaactttgaaaatgctttttccgcagccttcaagagaatgaaactccagggtaggagagcatatgtaaggggcagttagtatggaagatgtcctagggtatggcggttctagagttgaggacgctgggatcatatcccactgttcgcatcctagatcccagctgtgtgaccatggacaaggccctacacctctctgagcctcagtttcttcacggtaaagtgaggtcaactgtccctgcctctccaggttggtgtgggggtttacagaaataatccatgtgaaacacttagcctagcgctctacacaccctaagcacctactcacaggaattaagaccatgattcaraaaacacttcgaggaaaaaagaaaacttcctacactgcttcccttgtgtctagcaaaagggcatatgcctgctttgctcctccctgcatggctaatgcttagagacaaaatgttctccctgaatatcacaacgtcatcaccaacttctttgctatgatgtttcttgaacaaagaaaatggaaaagtgggtctctcatcaggagtctgctccaatgacgctaacagaaaaattcgggcttgggagcaattaggaagagaagaggcaaactcttgaaatgacttttaaaactttctagcagcccaaacccaaggattccttccacctgcctgtccccagttatcatcctgcctacaaaatggggctaaggatactgctaggatttaaagcgattaagtgaattaaaaatcaagcgctggatagctgagttgtatatcaatgtgaaataaatggaaagaatagattctaaggagaccaactaaaacactgatgcaagccagtggcaacctgcctggagaattcctggagactccagaatgtccagatgcaaaaagcagaaaataataagagctgagcagtcaggagccagaagccttcatgtttaaatgaagtagacttgtcactgtcaaaagccagtatacacaagaatcccctgaagagcgctcagaaaatgcaggccccttggccttccctccagtgattctgataccggaggtctgatgtggagcccaggagtctgaattctaagaagcgtctaggcattgctgtgcagctggtccgggcctacactttcacaaacaccaacagacttttccacaatgtcctattcagttgctttttttgtgcataagaaacacttttccttaagcaagagattaaaagggaagaaacagaactttaacccttaagcttggtaaactttcaaggtaattaaaagagactggttacttgctggaaaacaaagtattcatacatccatacaccatggattgggtaaaacataaatcatgttcaggtgatttaacatttctctgagacggaagaaattcaatgactgagtaaaaggcatcaagcaaactctctatcacctgcagttagcagctacaatartattcaagccacccattttgcaaaggaagcttggagcaagaacacayaggaccactatattcaggaakgcattccaggaagggttaaataaatcacatcagaatatagcttattaccactacacataaacccagaaaggggttggggtccaaggtgatctaatattttcataaataacttgaaagatggagtgggaattatgcaaatcacaccatagatgatacaaaaatggcagggacggcaaatctgtggagaatgaaatttaactactgggcaatgtctttaaatttgcctttattgaatcttgtatattgaagtcacatattattggatctgtttattgagactcaatgggaccaaatgcagactgatttatggaagaaggaataatcaaacgcataagtagaaaagagcatgcacctggagaggcatcgacaccgaggctgggacaggctccgactagtaagctgttgagagggtggacagggcataagtaaggagatatgtccgctgctctttgagccacctggacttgatgctacttcttaggartgccatgcttaagtgtagacctggaagggaattccaagcagggtgccatagagactatggggtggggccctaagtcaaccaagaatatatgggatgttcagaaggtctcccagacggacaaagccctaatgtgcctattcgtaggggaaagatgcgcaaacgacaaggggacctgtaggagagaaaatcttcagctcctattaaggaaaaacactcattcgaagcacagctggcatcatggaagaaagggcagcttatggtaacaccatccctagggacgctcgaggaggtggccagacacctctctacttaggatgcattagagattattaaaagcactccttgcccagtttgggggtggtgggggtgggccttgtgacctctccaaaggtcatttctatcccaaaggatcacatgtctgaagggcaccagataaaaataaagtctattaatcaccgagctgccacacaatttccaaagagagccagaacagagaagggcaatcgacggtggcccctgctccaccgagagagggagaggaggcagcacgcatgcggacagagccaagaaagcagccgctgagacttccagaaagcctgccgtcaggcctcccaggcactacagggcacacagaaggtgggagagagcctgcggggagggcatcgagagaagcaaacgtcactgagagtcccgaaacaaagccatggggactcaggagacagtgtgtgatgcaagcactttgcagaaagaggggtgcccagtaagagagggatgcccacaaacagcacttcatggagatgatccacaaggaggcagaagtcagaggcaaaggtgggaggagaggaactgggaggggatgaagtcagagaaaagggcacacaggtgtgtgtgtctgggagtccatgggattatgatgggctgggaatccaatgaaagctgcagagatagagcaaaaagggatcccacggtctatagtagcagacaattacatacgaagataaagcattttaaaagaggaacaaatggctgggtgcagtggctcacacctgtaatcccagcactttgggaggctgaggcaggaggatcacttgaaaccaggagttcaagaccagcctgggcaagaccccatctctacagaaaattttaaaaacttagccaagcatagtggcatgggcctgtagtcctagctactgcgtatgctgaggcaggaggatggcttgagtccaggaggtcaaggctgtagtgagctataatcctatgattgcaccactgtactccagcctgggtgacaacgcaagagcgtctcttaaaaaattaaataaataaaaatgaataaacgaagaatatagtagcaatgccccagttccaaagcagttgttggcattcttgatagatgtgctggtcaagccaaacacagctagaaagcccaagacggtctgagggcccttcccagcccatggcttacagccagtctctcaagggtcagcatgctggggcttctatgtatcagagtgaaactgaacgccatgtaggaagcaagacccaggccaaggcaggcacctcctggtgctgccaaaaggcatcagaccccatgcccygctccttcctcatcctggactagaactgctttggggtggagacgttacctgcaggagtcatctcaggaatggcatctgcatggagtattaagcagccaaatgggagtcatggagtttgagttcttctagcaaaatgttctccaaccagctgtcaccccattggacacagaacaactttttgaaatcaaaagaggccagtgaagggggagacaaaagacaccacccccagggtgctccctgggccccacccctaccccgccttgccagctctctccctgccttcagggagactgcagaccctggcgagatgggtgggacacccagagggagacccgtgccagggtccagcctcgactgtttcactgccatcctcgctgcagcctcttccctcctatggcgaagctctgcatcctcagagaggagaagacggcaagtgaagatcattaggagtgtggtggtgagggctgccctcccatagaatgagcaaatggtacccggtacagtgagaagatgactagggcacaggttttcaatctgcctcccagtgctctgctgtctggagctgaccacctccctcatcaagctgcaggtttcccgaggtccacccactgccctggctccctgcgactcccctcccgtgggctccctagctctgtctgcacgccctaaactcaggagccagccaggcagtcgcttgtccaaaagatgtttctgaagcaagcaagaaaggctggagatagattgagggccatttattaaagtaagtcatcgtcatagaaagattcataacttgccctacctaggacaggagaggaagagggaaaggaaattaaagggaaacaaatgaaaagccatggcgagccaagtacctttgtcggagggttttgagttatgcttttgtttgtaactctctgaaatacagaaagaaatagaggatgaatcttaaaggagacagagcgcgtgagagagagagccggaggagagccacacaggaggcatggcaggaggtgggggtgcagaactgagggtgggggccaccccagctggcttcccctctgcagaaaccccctggggcagcagaggcccaaggaagtggtgactgcggtggaggcggcaggcgagtaagctggggtgcagacagaggaagaggagagcacacactgaggttggcaggcggatggccaaggaagcacagggaagaggggccctgggggcaggcgcacaggraggaaggaaggtgggaccggcccatacttactgtcacagacgtaaggtttgtcgtggtcttcctgagaggcggcgtcgtgcctcctcctgccccctgcagagccgcgagcctggggagacattggggtacaggatgcttgttaccatggtcatcactacagctccggagcatgcgctctgcgagctccttacaccgtcttcatcccaacttttgtgccaacaccagtcccatcttacaggggaggaaactgaggcccagagaggtcaggagacatgcccccaaatcactcagttgctcacctgtatcacctcattaaatgttcacaackccaagaggtggtttctactagggtccccattttacaaaccaaaggactgaagccatagagaggttaagtagcttgcccaaggtcgttcggctactcagggcagctgtactgaaaagccctcctctacmaaattcccacacactaccgtgccrctgaggccgcttcctcctgctccttagcctcctagcttcactgrcacagctgaggttgacaaccccaggcccctcagcagaccagctgatgcacgtatcaggagcaaggcctgacgggggcaaggcwaggcttctgtgtccatccccgcagtgtcgcaagagccagacagtcctgacatccaggcccagtgcacgagtgtagmtacaggggagctcccgccaccagcccatgcttggcctactcagtaggggtgggctttggctaaggcctccctgtgtggtctgccttgggccttcagccagtgacgaagaccttgacccccatggtctcctgggctggacttctgataccaccaccctgtgtgaatctcccagggtggcggtggaatgagctctaccttcaagaatcaaagagcccagtcagagaggttgctggcagctctgcagccccagggcggtggtgacaagaacacagcgaggtttatttttaaacctttgtaagtcccacactggtcacgtgtatagcaccctcgcctctccaggtcattctttggtaatgagtagcagtcaactcccaaccaaggaaagggcctgtcggggtctttggggacagagaggaaggggcagcaggtgaggaataagacctggcagcagcctggggtgcaggggaaatggggcagcccctggggcctggcttggaaaagtggccatggggacttgatggtggaaaggccttggatactctcacacacacactcacactctgtgcacacacacactccatgtacacactcaccggggacttcacagtggaaaggcctgtaccctaggcctgcaacacacccactcagaaaacacacccacttcccaatcaacaccacctgccaagctaccacctctgccacctcctcagcttgtctctctccaaaacaaattccacttcctccctccctcccaccastctccctccccaccccacccctgcagcgctgacagccagcagccctcctcccctcgccctcattactcagagttgaccccaagaaggatctgtaggtgctggcagtcaccccgggcactgacaggcctcctgcctgcccgcactgccgagggtggtcaccctcagctgccctccccctccacacccctctgtgaagccagggacagcttgacatgtagcctgcagccctgtcacagccgcctctgagcaggtgaaagcaagtcaagcagaatgacgaggcaacagcagactggggaaggggctctgggagactaaaaatacctccatggggaaggggaggagtcgagcagaactggatgtacgagggcttctgggggagctgccagcaggaaagggagggtgctgtgggagccaggttttcatctcctacagcagggctgaccagcagagtgactctgtgccacactcgctttgcctcagtttcctcaattgcaaaatggggatcgtgtctatagggcacttcaggggacatgcaagggactcttcctgaggcagyagcactcttagggtctcttagaagatctcaggtttggaaactcagaatcctacttggccttctcaaatgtcacctcctcagagaagcyctccctgaccaacttacatccactcacaccctctccattgttttctttcccctcccatttcatcatggcactgagcgctgtctggcattagattatacctgtgttggtttacaagttgattttgtctcccctacatggagagacaaacatggtggagaccatgtttattttggcccccactagtctcagaacctggcacagggccagccacataagaagcacttaataaacattcgccaaatggatgaatcaatcaggcaggcagcgagtcagtcatctctggttcttctccttcattctctgtatccaaatgttattgcttcttcctccaaaggccatctaggctttgcatttcctttccattgcacaccctaatccaggagctcatcgactgacccctgagctgttcaaagaacccactaagggggatctacctccacattgcccccctagtccaccctaacgggggatctacctccacactgcccccctagtccatcccaagggactttcagaccattagacaaagggatgaaagacaggagcccatggtcataggttcacgcattcacacgttcattcattcattgccatctacaacccacttacacagccagtggcaacctagtgctgatcccctcgggttcaccccatgattgtgctctcctctgcccatgcacatctgatccaggctttgcccttgctaacctccactcctccaagaatcttcctcttgccacactaaggagtgaaaagagcatccgcttaaagtcagatagacacaggttgaaacaccagctatgtgtcttgggcaagttacttctctaacttttagttttctcaactgtaaaatgagcacaccaacacctatatagcagagctgttgagagagtttgagctgagagtgtgtgaaascacaggggacagcactaagtccacaggaagcactcaacacatcatttcccccctccttgcctaggctgatctctctcctctgaactcctgttgcctttggttagtgcacagtcaggtgcctgctgtttctaatggtatcatgggtattagcatcttcttcccagtttgattcgaaggtccttgagggcaaaaatggcattctatactttattatgaccccctaacacttrgcacatagcgtgcaaagctcttttgcatatagtaactcagttaattcctacaataaccctatgagttagaccaagcagtgttatgattcctagctggcccttgatgaagcaggttctcacctgtccacagtcccagggccagcagaaggagcaggacctaggtctccaggctctgttatagaaagcttkgaaggtgaccagccaaaggaagccaatccttcttccccaagaactgcccaccctacttcattcctctctaccagtattcccacactgctgggccatggcagccatgagtgtaccacatggccctgtcccactggccacagttgattggctggctcgggagtagtcacctgattcaagctgggccaatcagatcctacctccaaggggtttggaattagaaaacagtgaccctagctagtataggccacttgaactgagggcccatacattcaggagccttatggggccatgtacacatggaagcaggaagaatgaaggagggagaagtagaggccagaaaccacctgggttnctgtttcccaatgctaagtccctgccatgttcctgctcttcctgtggtttggatcttcaaaggttgctcaaatttggggcagtggcctggcagcttttcaaatccttcccatttttattgaagctgaaagacccttgactaggacagactcggtcccaagcwgagagctagatcttctataccagttgttctcaaacagtgtggcccaggaatcctgggggatccctgagtgtcctttcagggactctgcagtgtctgaactattttcataggagtcctaaaacgtgatctgccttgttcactctcacgctctcacaggcatccagtggagtcttccagaggcgacatgacacgtgacgatgctgtcactgtgtgtgtattctctagtttaaaatttgttttatttttcttgtaaatcttttttactgggctacctcttaaaccacaataggttcagagagacaacctttttaatttctaaaatggcaaatatcattagtggtatgaatattactggttataacctgaataacagcctttgggggctctcagtgtaaggaattcctgagatcaaaaaaattgagaaccactgctctacacccttgctatttttttnttttttgagacggagtcactctgtcatgcaggctggagtgcagtggctcaatctcggctcactrcaacctccgcctccgcctcccgggttcaagtgattctccgcctcagccccctgagtagctgggattacaggtgcatgccggcatgcccagctaatttttcatatttttagtagagacggggtttcacactgttagccaggatggtctcaatctcctgacctcgtgatccacccgccytggcctcccaaagtgctgggattacaggtgtgagccaccgtgccaggccttttttttttttttttttgagatggggtctcactctgtcactagggctggagtgcagtagcacaatcacagctcaatgaagccttaaccactcaggctccagtgatcctcccacctcagcctcccaagtagctgtaaccagaggtgcacacygctctgcctggctaattttttcagagatgagttctcaccatgttgcccgcaggctggtctcaaactcctgggctcaaaccatcctcccacctcggcttcccaaagtgctgggattacagttgtgagccaccgcacccagcctacacccttgctatttaaagtgtggtcctgacaccagcagctccagcatcacttgggagcttattaaaaaggcaggagctcagcccccaccccatggacttactgcatcagaatttgtattttaacaaaatcctcaggtgctccatatgcacataaagtttgagaggcacctgaacaccacagtacataaataaatacttcatgattgattgataattgattaattggtaatactcacatggatgactcacaagaatctcatgaattttaaagagctttgacttcttgggctgaagttaccaaagacacaattattaattgttgggctcccctcaccactcagagaatacccattatcaaaattccaagagttattccctttgcttgccccctcctgataatatctaggcagtatgaagcactcaaaacttactgatgaagaaactgaggcccagggtacttatacaatttgcccaccatcacagaggttacataattcatccaacgtgtagtaagtggtagagctggaatttgaacttgcaaggtctaagttcaaataaagcagagcytattctgtaatccctaccttagccctggcctcctcagtgagcacacaaagcacctgggggcttgtcaaagtgcagactctaattctcattaatctagtgtggagtctgggcttctgcattcctaatgagctcccagatgatattaatgccaccatccagagaccacacacagaggtgtcaagacttagactgcctctaggttctgacaagacaaatgggcatagttgttctccagtgccagcagcagctggaatataccactttaaatggtgggcaatgagctgggtatggtggctcatgcctgtaatcccagcactttgggagacccggacaagaggatcgcttgaggccaggagttccagatcagcctgagcaacagagtgaggcccccatctctaaaacataataattataaaaaataaagcwtgggcaaaacagctgaactgaggctgtgagtgcagcagcttcacacaccccagcacaggaggcttgcccacagccttctgggtccttccatggctccgtgcatgggtaacatgtccacagtatcactgtacaacatggaaccattcagctgctgcttggccagtatctggtgggcccagagccagtctaggctccatccagccccctcactgtgttcaggtgtctctcatctcccctacagctgaaatacgacttttctttctcttttccatcattcaatcattcattcgacaagctaatcattggctatatgctgggccctgggccaggcatgaactcagaggagaaagcacagacctgtgttcaaatcttagcctcttccttactaggctgagtgaccttgaacaaattgcttaacccccctgggagcaatagtaccagcttgtggaaatgaaagaagttctgaccaatagaaatacaatgtgagccacactcatcattttaaaatttccagcagcacattttttttaaaaaaatagataggtgcaattaattttaataatatattttatttaacaatatatccaaaatatgatagttttataatttaatataaaaattaagaatgagatgttctgcattcctttttcatactaagtcttcaaaatttcatatttattttatatttacagcacatttccattaggactagacacattttgaggactcagtagccacatgtggccagcagctgccataatgcacagtgcagaaatagagataggagtctaaagcacctggcacaaaggcatcactctctatgtggtagctcttgttatacagagcccatcacattgcctggtttacaggaagtacacagtaaatatacatggttgcactgactgctgatgttttcacagacacccaattcatatccactgactgcaagctcaatcttctaaatgtaggttggggagaggtgtgaagaggaccatttcccacacttgcrtcagtttggttggggtgagagaaggaaagsaagtgggtctggacatgcacagctctttgggagttcaccaaaggyccaggaagtccaagctcraaagtctcctttaataatggaattcaattttctttttaataccctcccctccgtgaatgggtctaggccagtttatcaatggctgcaaaaatcattaagtaaaaacttgatgaggaactgtataagggagagatcaggctgacaacactcaaatctactgatcaattaaaacaccacccaaagcagaactggacagggtatgcccctgatgtgatacgagaagaacctatcaccacctaggaaggattcttacctccccacaagaaatgtttgtacacacatacacaaacacacacacacacaagcacacaccttgaatctaagcaagtttctaatcaaactaccagttttcaggaaacacagaggatggagaaagacattaaataccaccctcccaccacttctagaatgtgagaagttccacaagacaaacaacccaaattcttcaacaaattaatggcatggagaaaaaaaaatgtgtgtggtggggtgcaatacagaagagaatacagaagaggtatgctgtggaatccsggagacttcagtttcaaacaaaccaactataaaatggcattttttgacaaaaggggaaatgataagggactagatagtaggtattataactattattttattggatatgataatgatatctgttaaagacacacactgagatatgtgtcagttaaatgataagatgtctagaacttgttttcaaatactccagaaaaaaaatcaaacaaacacaaatcaacaaaaagtaggagaaaagaagagacgagccaagatagccaaaatcttgctaagtgatgaggctggtcccagctgtaccagaagtgcaccatcagagagctgcccgcccagcccctgcacaggctgcacagccccacatgcgacaggctggagcatctcagctcagtgtgtgccgcgctggccgatgtgcagcggccgcctgggaacttgcttctaatatagtataaagcccygccccagagctcctaaagcagaatttctgagtggggtcctgggaatctgcattcaataagctctctcagtgatcctaatgtctgctgaggcatgagaaccacaagagtggagagccctgccatggttatcattggcagcaaacccacagaatgcctgggactaagtgcttatccgtgggaggggtaagagtcccgcctagagcctgaaggggtgagatyctcaagcctgagagtccattttccaggtggacagcagyagtttacttctggaggtccctctccacctggttattgtcacatgcccttgcagaccccagacggccaccacagaaagccccttcgggcgtgaactctagattcaacctgaatgcctggaagtgcctgaccagtctcttgtttttattccttccacctgggttttttcccctctgcccttccccaggctctggctttttccttgtcccatccraggacccctgggatggtctcaagcctccagagctcatgccaaacccactgggagccaccagctgcagccccctgctaccccggcaaacttctttttttttttatagtcatgattatggtttatttnttttttttattatactttaagttttagggtacatgtgcacaatgtacgggttagttacatatgcatacatgtgccatgttggtgtgctgcacctattaactcgtaatttaatattaggtatatctcctaatgctatccctccccccagcccctatctcacaacaggccccagtgtgtgatgttccccttcctgtgaccatgtaccccaaaagcaggtaccctgactctgtcattctggcacagcaccagggacaaggcaggaaatgtccagccttctttagtaaccaagcagtggtgacaacaggcacattctccttatcttccaccctcaccctgatcccacccttcagccctccccagacctcaccacccactcagggtaccccctctgcctcctctcctccctcttgccagctctgaactcttccaggctacgacctgggatcagagctsttctggagttttctcctttgagcgttctccatgtaagaccatggccatgatttccatctagctgcagtggagatcaatcgttggccgggcaccccagcctccctcatctctttcctcgctcatgtcatccccaacttacccgtcctctagtcctgttctttcgcttgggaatatcctcttccaaatcctcttcttcattcccttcttctacattttcatcattttccaaaaccctctgaaatgaaaaaaaaaaatagaaaaggtgagaaacgaaatgcaaagggaaaaaccatcagagagtaattttaagggtgttctgatttgttgttattttttaacmaagtgaagacgctgcctttgcttgggcagttgggccctctgaaatgctgtctggagtttgaactcttggcactaccgaggctctcctaagcccttgggccccttccagacaagtcctcccagaacactgacctttttccattctttttgcccaagaagagttttctaacaagagactatgctggtaggggcccttttctatgtggggccawaatgtttacttttgtaaatgtaatgtttctttttgctcccaaagggccacctcagaaatatgaaaatgtttctcctttccctgccattctggaaccctgccctgtctgatgaaagcaagtaacttcctgttcatctgaccagatttaacacgaatgtgctgttcataataagccactgcttttttttcttttttttttttttaagaaaaatagactttcatttagtacccgacttgtcatggagcttaaagataatgaattttaaattatctctctccagcagcccgccagtcacattgcaacatagaatccaatttccattttgcaggtgaatacrctgaggctgaaaacagttttgagtgctccagatcatccagtgaagccatgaccaaagcaaggtcaggttcatcggctcagggttccccattcatttctcagcacagtggctgagaattccagatgtaatctggcatactctccatgtaggggcctaagcacgtcactccctttagaggaaggaaggaggtaggatgtgttcctctgggcttaagggagggataaaagactgtagcagaggacccagccccacaatgggagtaggaaaagagggaaggggcatggagctcactgggctccatgtcagggggcccagaggggtttttgtttgtnttnttttttttctgagacagggactcactttattgcccaggctggagtgcagtggcacaatcacrgctcaatgcagcctcaacctcccaggcctaagcgatcctcccacctcagcctgccaagtagctgggactgcaggcacatgccaccatgcctggctaatttattttttgtagagatgggggtctcactatgttgcccgggctgacctcgaacacctggtctcaagtgatcctcccaccccagcctcccaaagtgctaggattacaggcataccatgcagatgagctaccacacctggccacctgggggkttctttatgggctcactgtgtgatctagggcaagtcatcatctcttcatccttcagtttccccaattatacaataggaattcattcattccatctacaaacatttatctagtgcygactacrtggcaggctccatgctaggcaagctgcaaaatggctacagtcccagccccaaatggactttccagtctaggaaagggagaacagatttaaacaatgtgcatatgtcaccatataattacaactcttctcaaaacagtggtagscaagttcaaagtgctatgagagggtgttaggagggagttttccctaatccaagggccaggggaggcctacatgagaacatgagctgagaagttgagatgtggaggatgagcaaagactggccttgtgaatgaggacagaggggagggagggaaaaggttctaggcagaggaaacagcataagcaaactccctgaggcagggagaggaacacggcttgtccaaggagcagaaaggccagtgtgaccagtgcttagtggctcaaggagagatggcataagatggagctagtaaggggaacaagtaccatactacacagggtaaccccatctcctcttccttgtggtgatgggtcaaagatcacaaatatgttgagaaggctgagacagtggcacacactgcactgttgtctgataaccatcgctgtttaagccgcctcctggatgacacctctggcctgtcctcaaagcaggaagcccggggtgagccaccaggcagtgatcttccaccactgcccctggctagaatgttctgctctaaatcacagggatcaggacacttctagtcacccaatccatccaaagaactcaaaacaggtctagtaaattcttctttgccttttctactaggtttatttgggaatccaccagctgacagcacttaaagggtctctgagccagccttaaccatctaacagagaagaagcattgtctgctggacatgacctctggcccataactaggaaacgtcagcccccattcacagtataagtctcttgagttcctgacctgtaggtgggaacactagcaaaagccgactgagacagtgacaggtcaaatgctctgcagcctttggggcaaagacatagtataaatataaggtctggttatgactgttgttgctgttcgtagaaccatcttgcaaactttccaggtcttgaagtcacttaatcatggtaagttccaagtgcctcgaatttaaaggtcatagcctctggcatctcagtacaactccgactctcatttttcattataagggtatttattacccgcaatatggactctgggttggaaggtgaaagactggtagaggcagctgagctagtccccagagtgtcacatggcctccatatctgggagtaaactgacttctcttctccctgaggctccatcctccctctgcccatcagcttccctgtgactctaaagcctctgtctatgccctgggcctcagatgtgatggcggcagacccagtgtgtctgcatttcctgcgatgcggccctgacaccagaagcctctcgacataattcaggaggagccaggagtttctaacaaacaaagcttgtttcagacctcaggaagcggagggggagtcctgcatcaggagtcgcygacgggggtggggtgtccaactacaaagtcagctgaccccccagtaacagacatgcattccttgtccaaggacattatctggaaaataaacacattttaaaataacttttctccctgttactctaaacagtctttatggtgataacagcggtttgtggttgtgtttaaaaaaaaaaaatcctttttaaagactacattatctctggcctggaatactgcaaaaatctcctgatttccctcctkccattgctggccccacatccaatctcctctccatgcagcaggcaacaggatctttatgaaatacaaattcacggccctgatcaaaatcttccaaatggcttccttctttatatcacatggaaccaaaagccacttccctgtcctgtgggaactaggtggtctggtctcggcccacctgtcaaactcctgggctcttttttccctggcacaatactccggccacacaggtcttctgttctctcaacaaaaccagctctgacctgtcttggggccatcacacccactgctcctctgcccagaaagctcttccccaggaccatcactttcctgactcttctcatcccatagggttgaggttaaatccctcaactcgaccagatgcggtggctcacgcctgtaatcccagcactttgggaggccgaggcaggcggatcacgaggttaggagttcgagacgagcctggccaatgtggtgaaaccccgtttctactaaaaacacaaaaaatagttgggcgtggtggtgggcacctgtaatcccagctactcagaaggctgaggcaggagaatcgtttgaacctgggaggtggaggctgcagtcagctgagattgtaccattgcactccagcctgggtgacgaggcgagactccatctcaaaaaaaaaaaaaaaatccctcatcttcctcaggaactctactctgatgctgaatcttcatactgtttgttctcatggattttatcctaaaatgcacttattttatttgtattccttgtttcctgcctgtgtgtcacattcgaatatgagtagagaggataggtatctcttggtctctgtgtccctagcacccagcacagtgcctgcacagaggaagccctcatgaaactttggtcaaatgaatgaatgaatgaaaaagcataatccattcgctacatgtgtattttaataatgcaaagtcaataaaaacacgtaaactcatttgacttatggtcctggctttgtcttctagcacagtagacagcagacccatgcgctgcactcagcagaccttcagtttacataggagatgatggtgacatgatgacgacaatacagcaccagcccagtgctgcatgagaagaactcaagcccaccaccagctttaaagggaaagggacccacatacccagagcatcaaggctctgggcagtggctctgccccatkcattgattctgtcaaattacatgaactaagcaaaaaaatactctagcaagtaacacagagatgacagaccttgacttcaaaatctgaaagtcacatacacacacacaaggaagaaagcagtaggtggcttaaacaccaaaggcaagaagagatccctctggctggaggggagatcaagaaaggcttgatggggaaggtggcactggggttgagtctaaaagatgagtgagatttgtacacatggagatggaagaaaaggcatgccagataaagggcacagcgggaccaatggcatggagggaagaaggctgaagaacagagcggcgaaaggagtagtggaaaataagcctgaaaactaggttaggaatggagaggacacgcccaggaaggtcacgctcatccttttcgatttatttagtgggaaacaacagttttttagcagagttttgctctagaacaaaaggacagctagcaaagtaggacatgtcagagacgggaagaactggggacagggcgattcctggaatctgttccctcatgtgtccattcaacaaatatttatgttgcacctggtaagcaccaagcactgtttgggtgcttatgagatataagcaagcaaaactggcaacggatcctgccctcgaggagtttacattctactggaagaaaacagacaataaacaataacataataagtaagtaaattagaaagtacattagatgatgataagagtgatggaaaagaacaagaaaagcagagtggaatcgggaggcaggggcagtcagggcaagggtgtgagatgaagtacggcacggtcagggacatctttgagagaagaggaaggccaggcaccgtggctcatgcctgtaatcccagcactttgggaggccgaagtgggtagatcacctgcagtcaggagttcgagaccagcctggcaaacatggtgaatccgcgtctctactaaaaatacaaaaatcagccagaggtggtggtgcgcaactataatcccagctactcaggaggctgagacaggagaatcacttgaacccagtaggcagaggttgcagcgagccgagattgcaccacttcactccagcctgggcgacacagcgagactctgtctcaaaaataaataaattcataaataataaaaaataaaaattaaaaaatgaagaaggtgagggtgagagacaagtgtacatcyggggaaatggccagggcaaaggcctgaggtctgggacaggcctggcawgttctgggaggaacagaaggagattcttgtgcctggagtggagtgggtgaggaaaagaggaagagtggagtcagagaggggtgagaaggccctgaatttcactctcagatagcaggggcggtagcgggttctgagcacagaaatgataagaatagacttaaattttaaaaagctccctctcctgtggtgtatctagacaacagaatattattcagcattaaaaagaaatgagctatctggccatgaaaagacatgaaggaaccttaaatgaatgttactaaatcagagaagccaatctgaaaaggcracatactgtgagtccaagtatatgacatcctggaagaggcaaaactatggagacggggaaacggccagtggttgccaggcattaggacggagggagggatgaacaggtggagctcagaggatttttagggcagtgaaacttctgtatgataccgtaagagtggacagatgccattacacatttgttcaaacccattgaatgcrcaacgccaagagtgaaccgtcatgcagactttgaacattgggtgataatgatgagtcagtgcagctcatctattatagcaaatgcaccactctagtggaggatgttgatcatgggggaggctataccaggggtacacaggaaatctctgtaccatcctcttcattttgctgtgaacctaaaactgctgttaaaaaatatttttttttaaagactgcccctcaagcactatcagggagaccactgagaagacaaccgcagcagttcacacaaaagatgagagcagcttgggccagggtagcagtggtgggtgcggggagaggggatgcgggagaactgggcttatgttgaaggcacagtcgacaaggctcctgatgagcaggatgtcaggtgtgagagacaagcaggagtcaaatatgaccccaaggtcccttagacaaataaaggtgacagttaatgaggatcttcactagggctgcagctcgtggaaaagagaggagggaacaaacacaagccatgttgtggcaactcaatggaaaagatttgacaattcatcttaacacgggaatggcggagaagaaggccaaattctgtgattcattcaatgcctttatcgagactcaactctacccagcttgggaaaggccccggggacactggtgagcatgaccgcattggccctggctatcgatggaacttaccaagccaaccagcaatgtattattccattattattaatttaattgtagttttaataaattaatatataaattaataaatttattgaatattaaatatgcacaataggtatagcataaaatataaacatttaatatgtaatataaatttaatagaaatacaatttaattttaataatttaatattaactaccaatgctattatttcataataggatcaattcatattacaatactcaatggcaaacattgtattagacaatgaggattccagacaaataacaaataagagatggtaggtgtgaagtcaggtgcagtgactcacgcctgtaatcccagcactctgggaggctgaggcaggcgatcacttgaggtcaggagtttgagaccagcctggccaatatggtgaaaccccatctctactaaaaatacaaaaaacagccagatggtggcacatgcctgtaatcccagctactcggtaggctgagacacaagaatcacttgaacccgggaggcagagtttgcagtgagccgagatcgagatcatgccactgcactccagcctgggtgacagagcgagactctgtctcaaaaaaagaaaaagaaaaagaaaaagaaacggtaggtgtgcacccttataatcctattcagtgagagttttagaagtggcatggatagagggtagtggacccatggggacagagcagccatccgcctgaagggtgaggacggcatgggcttgagggatggctgggcactgctgggaaacggagtgtgcagtcatggggaccggtgaggctgggtgtgagggtggggggtgggcaagccggactcacgtggccgtagctggagcagacgctcccacgtttcaagcctagacaatggactcttggttccatggggacaaggattcagactgttttgtccactctgtgtccctgggaccctgcacagtccctgtgttcactaggctcaacaaattcactttgcatagacagacagaagagagggaagggaaccgaggtgaaggcaataatgactccttcggaagataggttaagtcagaaaagaatttgggagcttcctggccaccatagaaacaaggcagtctgagactgagccccggcccttgaggggaggatctggagccaagccggtgctggagttctggaagcgctatggtgacaggaacactctgtggggtccccagcaggtgygggaatacctgtatttcctggatgctttcctcctccctggcatccaccttcttctcaaccccctcgccacggagcaaggcttccagcgtggtgctctctgaggtgaacccatccttcttcaggggaagctccacttctgaaaaacaaagatagaaaggcaggtcaggccactagaagcaggcagggcaggagggacagtcctggaggacacgcagggcccagggctcctgaggaggactcggggcctgtgctctctcctcctggagggagaggaacactggagccctgtccagcttttccatctccatttcataatccagagacagattccgaccatgcccacacccccagaggaagctgagccagagcagaaagggtgcggggtrgatgtgggctcacacggccatgcttctgcctctccagccatgacatcggacaaggcaggcgtcaggagcgtggagcccttattgcatccacaaagcaggggtaacaatacccaaccccacaggtggttttgtaaggggacatgtgttcatttgcgggaaagtgtttcaaaaactcaagcaatgcacaatgctggcaaccaagtatgctcattccctcctatcccagctcttgtctgtcaaccccaygacctcctcatggccatgctggctgcccagctctgctttcctccatgaaaagctagttcagcctcagaaaggttgttctcttcaacccagggggaagtgagagcttcaaaagccacgggaagaggagcgacggcgaatgcctcacaagccccggatgagcagagtggccactgcacagccacgccacgacctttttttctgaaggtatcaggagtttgatcagctacctggggcttgagaagagaagccctggggttgccagcagagaagtggcaacccgagccagccctgcccagaagagacaccagagagaagctgaaccccttcctccaggtgtcccaaactcctgacctgacagagggttggtgtgtttctttcttttctttctttccttccctcctttctttcctttccctccctccctcctttctttctttccattctctctttctttctttctctctcccttctttctttctctttctttctttctctctctctctctytctttctcttttagagacagggtcttactttatcacccaggctggagtgcagtggcactatcatagctcactgcagcctcaaacttctggcctcaagcaatccatctgcctcagcctcccaaagcactggggttataggcatgagccaccatcccctgctgtttttttaattaaagatgcaaacctaaggtacaggagatcattctgatttactaaaatatttcttcaacctctcctctgatcctggacctcatacccccacactgccacagtttgatatgtggtccttaccattgcaccaggtaagctgggggcaggaactatgatgcagtggtgtcccagaaaacaggagagatgaatggcctgctcttttgggggtattgagagtttagtgtagggactatttacagagatggggagaggtgattaagggatctgacaaggtaggttaaagcatcccaggtgggttttgggcaggggtgagggtggagaggggccattaccgctgctgctatttttggagggacagagggagagtgcttgcaagaacctggagatagcaccattagcasagccccaggacaggagctatggcttgcagaagccaggaaccaagggaagaaacaatccaaccaccctctccatccatcctccatcagcctgctgcgtcctctcccaagggccaaccttaaacagaagcgagaggggaagggagcccccttcacacagcctaccgagctccgagcagggtgaagacggaaaagcatggatctggaggggcaaatggaaagagcagcaccaccgagcctgctccactgggctctgtcctgactccaacagaatcctacctgcactttccacttcctccaccagaaacagagggagtctgacyaatccatgaggaagcggcaagcgggcatccattaaaactgaacaaatgcacacctgtgggtgaccggcccccagaaaaagaaggtgggaaggagaaacagcatctaaaatctcttgagaaacaaagtctttgggatttttcctaccaaaaaaggagagcaaaggatccacttcccatcaaggagcgctaccacgaaatcagccacctctgaatccatctatccattcaacagatatttactgagcacctgccataggaccaccactgtgctgggactagggacataggaggtgaaccaaataaagacaggycctgcctttaggaggcttacagtccaaagagacagatagtaaatgcaaaatacaaaatcaaaatgcaattacgaattgtcgtaaatgttagggaggaaaacgacagaatgaaatgtgaaagaatataggtaacggggtctaccttagatcagggagtcagggaaggcctgtatgatgaagttacatttaaggagagtgtcagacaaacagccaactgtctgctttaatgagttcatggagtacatctccatagcctgctctgatgacatattactctttctcccaagtcagaaaagtcttccaaatgtctactctaaagcaattagtgtgtgctgtctcatgtcctgtcctcagtcaaaagagaacagctggtcacaacccctcaaacttataataatcatatatacatagagttgaagttcatattttagtatcccccttagccttcgcagcactaaataaatcctatttattagtgttatttcccagaatggtacagcattttagagctagaaaagaccttatagatcatctaattcaatcatctcattttgtagatgcgtcacccgagaccctgaaaagttaagtaamcaccaacagccacacagcaggatgagaatgcagctgaatgatatttccaagttgccactgaaatcacgacaatggccccctctcattgtattcttattagtggttgacaggcttaggctgagccctgaatgagctttggtacatccgtgtacatgcagagggcttggcaagcagcaaacattcaaaacttagcagctgttactgctacgtatcaatccccactacacccaagagcacagttattaacccgttttacagatgagggcagtgcagcttatagaggttgagaacttgcttgatatcacacagctggtaaggggcaaagcccggccttaaactcaatctgccttcagacccagtcacctaattaggctgcatggactccaccctgtctctctgtggtccttccttgaaaagtctttttccaaacctttatgcattttcattacattctgagactcactccrtagttttcatatttcaggataaaaggcagatctttaactgaggatgagggcaggtttgtgccatggttttgggttctgctctatacgatcatccccgtgcaatgttcaccattctgcgacagtatctacccactatagaatgttccatcaatagtgaacttgcccctctcttccttctcctgctcttccttcctcctctgataaatatgcctccatcctgctttcccataattgaatctactctcttggtcctctttaaccaaactttaccagataggcacagtagaagaatcaagagggaaaacagaaccaaatgggaaaagtgaaatggaaaaagcaagaagggatctccaatagcatcaagagtccaatcccttaaacaggaaagtgaagcacagaaagatatagagattcccccagggtcacagagacatgtagtggcatcttgcttccctaattaccacaatarttgatttgctcccataggttctgccttcagacagccctggagtcaatccctagccttgccacgtattagtaaagggaccatgggctagctacgtaacctaagcctccatttccatatgtggtaaatgggtgtggtcatagtatctatttcagtgttggcgaatcaaacatggcaatgtgctacataaagaaacgctaaaagaatccacacacaaaaaaactagtgtgataaatagggtagaagatgaggcttatcaacttttgttttattctattcaaaacttagattcaaaattagatcatatacgtaaagaatctacaacatggtaagtatcctaaaaatgctagatgttattccctaagtttgaatagttttgatttcaatggtacagctgcactgtccaacagaaatgtaataccggccacttatgtaatttttaacttactagtagtcacatgtagaaaaaggaagaaagtcaggtgtcattaattttaataagatawtgtatccgatctggtatttctaaaacattaccattcaacatgaaatcaacataaaaatatggacgcaaaattttacattcttttatctgcattgtcttcaaagtctggtgggtattttccatttagagcgtatctcaattcagactagccacatttcaagagctccatagccacaggtggctaccagctaccataatggacagtgcagatttgcagcattaaaaataacattaactatgactttgcttccaaaaaatggaaagaattttactgtggttcttaatgttgtccacgtaatagctgccgagtgccattccaagagcagagttctagcggatcactgcaaaccctggttgcaaagcatgatgggtaaggcctgcaaggtcagagtgaaagggtagccatccctccctacaaacaaacacagggtgcactctgcctcctgaccacaggaggtcccagaatgaaggaggaagaaaggtaacaggtccaagcccttgcacaatgtatgtcctaaacacacttctattgagccctyagggatttcatttatccaattttatttgaatatggcccatctggatataggatttaataattctttgaaagtgtactcattttgaacctcacacaaacttggggcccacataacccgacaggagccattgaacctttaacattaaaagaaaatggtccaaaacacacacataattcatctttaaattagcctgattttatacacatggatataaacccatggatcgttactctctccrgagcggcagcagctgtcacccaagccagccgcctccctgggcccccgtaagcagctctgcctctacttctaattgggaacagagatactccttgggtgacttccagcacgatccatcacaccagagacagcttctgtgcaaaccgaagcaaatcggtttctaaataagaaaaaacctccgagacaaacaaggattgaagcatagaaagtcttttaaaaacaaccaaaaaaagcacaaataaaagcaaaaaaacaaacaaacaaamaaaaaaanccacacacacacacagaaatttccagcaaagagcaatggcttcttctctttagggctacagacagggcagccatcctcttgggtgcagatcaaagccacaagcttttgacacaggtgccccaagcctgccacccaatgcactgaaagcaaagcttccactgggttgttggagccaccgagctcattaacaggatgcaggcgagatgagtctgaaagtgcaacatgggagcacagtgagtaattaaatcccaggtcatttaaaaatgcaaacgccacgaatgtcatgagctccccaagcctctgactccttctccttcgttatttggctcaggatgaaggactggaaacctgcaagtcgtatatggattataataaaatatgccatatagaaaacagattaagacagttcttctttggggaaatatacaaggagaggagctgtctgttagctgtcgagtttgcaagagataccatctttcgggaggcagtgtgttctgccaacagacagactgccccaagggaaattgtggtgaaacaccccgacaaggcgcatccatccgtccatccatcatgggctccctctgatgcaggggcctggagatagagttatggtgcaaaagggagggagaaatcccacagacaatggcaaagaatcctcctgctagatcatgagtgctcaattttttttttttttagctgcctctagtttttcttcaaaaatacaaacatgcagttttctcgtctgggtgcttattatattgaggagttaagctcatcatatttccttggatttatacatcaaattacacgaaggagaaaagagcttaagaatcattatttcatttatccccatcagactgtcagactcgtgaggagggagaagggagggaggtattgttatctctcacctcacaggggaagagactggggagggggatcagagacctgatttcctaagatggtggcaggcccagggatccatctgctcattccctaggggtgccactttcttggctgcctttgactccctgttttgtgactcataaagctcgaaatagatgaggttcacattgaggacccatcacccaggctgcaccctgcaggccctattaccacttgctttagaatctcaggatatccatataacaggaggactcatccctcccccatatggcctctgctgcacctaccctctcacccctaagtagacacgccaggatgggttacggcatccagatatcaggaccacagataagcattcccccaccccgagatacagaaaaacacccacactgcccaaggaagctcaccactgagctgccagcagaccaggtaaatgcagctaccaggagggtgagacggggagggtggtgggagtggacagagtgcgggcagcatttccaaaggcaaggtcggggaatcaggagaggctggtcagatggtacagagtgtcagtcagacaggatgaatatgttctggagatctgttgtacagcatggtgactccagttattagtaatgaaaattgctaagagagtcaatcttaaatgttctcatgcacacacaaaaaatgacaagaatgtggagtgatagatacattaactagcttcatttagtcatttcacaatgtatatatatatttaaacatcacactgtatgccataaatatatataacttttatttgtcaattatgccttaataaagctcggagggaataaaaaagtaaataataaaaatgcaggctgggagcagtggttcacacctataatcccaatattttgggaggcgaggtgggtggataacttgaggtcaggagtttgagaccagcctggcctacatggtgaaatcccatttctaccaaaaaaacacaaaaattagccatgtgggatcgtacgcacctgtagtcccagtgactcgagaggctgaggtgggagaatcgcttgaacctggaagsgggaggttgcagtgagccaagatcatgccactgcgctccagcctaggtgacagagtgagactctgtctcaaaaaaaaaaaaaatgcatagtgcaaagaaatacagacaaccagaaagtgcaaaaagctgctctggggtgaactctcagctccattaccctaaagcacacacttggccttgatctccttatctgtaaacctgggagaacaaaacccacttcccactgttgttatggggccaaaggagataatacatatgaagtgtctggcacaggtgagatgctcaataastatgagctcccttctttccacctcctacagtttccctctccttgtgcttttcagcaaaaaaaccctcacctttctgacactctaagaccaccagatgtggtgagtgaggcacagctaaccccaccatgggcatgagcccagggaggatggaaacaaacggaatctgaggcaggtaacaggatggaagaggccaagaatgagacgcagctggaaagcagacgctggtgctgctccaagtccagggtggccattgctcctggagcttcgggggraaaatcatggcagagccacagtggaagataccctgctttatcccttcatttggcaagtaattatcaagcacctactatgtatcgactctgttctaggtgctggggcaatgactctgaagaaaagagacaaaaatcccggccctcatagaatttatattctagcaagagagaaacaatacatgaagcaaacaagtgaaaccttcagtgtgacagatggtaatcagtgctttggaggaaaaacagagccaaggaggagaagttggagtgtcagggtgatgggaggggggttacacttttaaatgtggccaggaaagtgcaagcctgaaggaagagagggagggggctacgctgacatccaggcaaagacgttccaggcaaaggggccttcagcacaaaagctctgaagccggcccatctgcctggagcacggtgagccagggggatggtaggagaccagcttggggagctacaggggcattgaaggccatgtaggcacctgcaagaatgttggcgtccaccccaaatgcaatggcaagccgctggaggtgttgagcaaagcatgatataatgatgcctacatgttaacagaatcactctgagaataagtgaagggggtcggagcagatgtggggtgaccagtgaggagttactgcaaaatgtatgtcgtctcttaatgagtttggtgcttggggagggagctatgcacgatatggacagagctctgtcctcatggtactaatattgtggttctcagatgtgtcctgggggcagtaagcactggggagcagtgccctgagcagggggcttccccaccagtgaaccaggatggaggccaagtggagaggctggtgtcaatgcaaagtgggcaaaggtgtgaagccacaccagggtgagtccacggaggaatggctcttcaagaagaaagtggaccagcccaggccaagggcagggaaaaagatctagccacatgggcctggcctggcataccatggtttaacaggtgtagtaaaagcagagaggaggccttcccagttcatctctgtgccctgggccatgggtgcctcggggctgagttctgggacataggagtgaggtcctgcaagctgtggttctggtaaaggtgggtcccacggccaagttctaggtcatctatagactggggccttttaaaaggctataagacagagctgggcatggtggcgcatgcctgaattcccagctactcaggaggctgaggcaggaggaggatcacgtgaacacaggagttcaaatatagcctaaggaacacagcaaggcccgtctctaaaaataaataaataaataaaataaaatgaatagactctaaggcagaatgagttgccattctgggccagatggcacacacttttccagcggggcagygagctgtctgcagcaaattcattttcggtgttggggacgggaactgtgttgcrgagacccacccagcagtgcagtgtggaggtagaatcacagtgcctcctcacacttgccaagtcctccaccctccatcccacacgcctctcagaataaccccgcaaaatcaccatgacccacatctcacagatgaaggactgaggcaggagtggttaggaaattgtccaaaatcacacagccagtggctggagggatctagacttgaacctaggcctgtgatccctgtttggtgcctgtcctcctgcagagcaaggatatttggacagggaaggcccctacaacccaaaaccaaacagccaagatggcaacacttgggccccccaggccaggctgggaaccacaagggaagccaagctcagccaccccaggcctctcctctctggcggagcctccctcatctgtgaagcagagatgatgagagctaagtcatgttctccaaggttaagatcaaacaccagacatgtctctttccctcatccctttagaaatctttactgcccatgtactatgtgccaagcctcatgctgggtgctagggatacagatgaagaaacagatgggccctcgccgtcaagttgtccacctcccagtgggcagaggtacaggtgagcaggcaatggcataactgggtgatccctcagactcacaactcatgctctacacgtggctctgccaggtcccactgcaaaacatgaccgtggacactcagcagcagccgtgccactgtcctgcccactgcctgctgccagcccacctcctcggccagcccaagctcccagagccctgcagaacaccagcagagctggggaacacgagcagagctgaagtcacacagacttcgtcccycagtccctgctcctttcctgagacggacaggaaggcaaaaggagcaggtcccttccagcacgtaatagccacagcctgagtgggggctgcacgccctgcccacctcgctccagctccccttctcatgaggccaaccagagctgacgaagctgccggtgcaggcctccagatggatggctgcaggctctgacactgcaggaaagagataaatgactggtcatttccccctgatgcacttgaaggcatccattctcccagccgtaccaagctcaggcaacccccaccgcccagagacagataagcactgacagatgggggtgggagccggagcgtccttccccctcggaaggacacagccagactcctctgcaggccgggagaaggtcgcgttgtccattggctcacacctggctcgaggctccgcgggtcccttcctccatctccccgttcttgcccacccccgcctggctcatccatctgaagagcacacggcagagggggaaggctgggggcagaaggagccgctgacaggctcatcaatctcaggttacatgcttggcacctcggcgttccttaagttgttcccggattgggagggtgtcgcaggagccaggggcactgtcttgaggagaagagaaatcgcaccgaacatcagagagcaaatggtggagaagcctggagactattaaaatgtgggccatgtacaaaagcagtagggaactaattaagatgcaggattttcaaaagctggggaagttggccgcagcctgctcccatctgtagagttctggcagttcagcgcagcagggacagcaccctgggtgggtgaagtaggcctcaccacccctgctcgagctggccagactcaagtccctccgcctggaccacccctttgggagatacccctctgcaggtccctacgacttgcttgttggccagcctgtggccctctctgctttgggacaccttaagccactgtcgtcttcggggtgcatgccctcttgtctgagtttcccccaacgacatgggatgggggcgatcatcctggtcgttcatccccagtcattgaaggactgccaaaaacagaaaaaatacaagagaaagaacactatccctggctgccctccctcccatcaccctcggaattcggcaagggtggcaaagagccaccctgctccccaagagtcctggagcagaagggatcgacaaggcctcaggtgcattccaggtacaggaggagcgtcaactgtaaagcccttttcatctgcgggtccaggataagtgagtgtgtcgggccttcaagcaacatggcagcagctccagcaggctccccatagggagcatcaccaggatcctggcatcaccaggatcccctgggaaattagcttcctaattctgtgccgcagtttcccaacctctaaaatgaagataatatctgtcctagaccatggggaccgaaggtctggggttgaaagatgctaaattgatctaagcagactatctgggcatttacttcaaggggacacaagtaaaagtttgttcccagcctttgtcttttcttcattcaaaaaaaaaaaaaaaaggaaaagaaaaagaaagaaagtgaagttaaaggcctcttttttaatcagctggcttttgcccaacatctgctgtgctcccaggccttctggtggatatttactctccacctttctcttctgccagctccactcccccttcacaaggacagagcccttttcctggggagatggtccgggggaggccccttgctggcaccaggcccctgcccaagtctttgtgttgtagaattgtgatgtctacatcatgaaacaccttgcattcgcctctgtggccaagtgcaagctgcagagaacactgaactcaattgtcagtcactggggagaaataatgttgtgtgtgttgtccttcagatgcccaggcaagtaggaggttgcaagatgtttattcaagactgactagaggggtgacatttggcaggagaaacacataggtccagggacactgagaacacttgcaaattccaaagagttcttcccagatctcaggcccttcctatccccatgcagacagatttttattttcagcaaataataaagaaacagaagagggatggtgcatttaccacactgaaggggtgaggacagcaggactgggagtcactccaggagggaataatttcacccaggaacaaatgactcgatgtcagccaagacccagctccccactttttttgagccagggcctccctctgtcacccaggctggagggcagtggtgcaatcatggctcactgcagccacaacctcgcggacttcattgatcctcctacctcagcctccctagtagtgtcaccctacaggtgcccaccaccacacctggctaatttttgtattttttgtagagacaggttcttgccatgtcacccaggcccagctccccactttccagcctgaaaggtccactcatcccacatgagcaaagtgcttcgggggactgaatcagaaaaggatggttctgtggcactgtcctcagatcttctccaacagccctcaagattcttgaacgtgcaccccccactctttgccctgacctggtttcctgacacagctccgcagacctgagstcagagaaaactctgaccctcgttacccctggacttcgttgctgaaacctgcccatcactgctggactcaggcagggacagaaaggaatacaggagggacaagctgaatgttggcataaattttttgtgacatctcctcactgtccataggagagtctgacgtggaaagaaactcatgccttgagacaattctgctccaggccagtggcccctcagtctcttgaagagcaggcagactattctccctcttcccggaggagatgaggacatgtcagggtgtgctgacggcagaacccaggtgggcttcaacagtactaggcaaaactagattcctgagcatcctctgtcaaggggaggtcacaccaggaggctgggagggaagatgaggaaaagacaggcatcctcagggggtgggtgtggaggggcaccwtgggtgggtgggttggttggttgggttctttccaacataactcagccttccagtttccataaatttaaagagatgcaacccaggatggacaaattatcgttcttcagcaagttttgcccagaggattatatacaatgttgtacaatttgctttttgttgtgcaatttgttttttttcgccacttagcaatatatctttaacatctctccatattttttttactcattcttttaaaggacaaaataatattccattcatagaatatacaagtactatatatttaactagtcctcatcaatggatcttctggaagtttccattctttgttgttattacaaaccatgccacaataaaaaatatatacccaatatatattatatgcatatattcatttatagaataagttcctagcaatagaatgtctaggtcaaagagcatgtgtgttttaaatactggtaggtactattcattgtacctcaaaaaggtcataccaattccrttgcaatgtgtaaaaaagagcctctccctccatctccatctctgtttccctcacctgctcccctctccttgggaaggtcagcctcagtccacccagctaatgatcctcacctcctaggaatttgcagcaaattctccagagactctggccaatgactctatcctgagtcacgcgcgaagtatcagccaaaaaactgagctctccttgagcccaaatcaaatggaataaaaataagagatagttattttaaaatactgtccgagttagccctgttaaccctcctgagggaggacatacccccaaaaaagggaggagtcctctcaagtggaaactgcattttatgaatgatgagggcagagcctctggaagttgggcaggttgtgccctcaaagggacccccaccaggtgcacagaagaggggctgagatctagctcgtgctctactaacccaccagaaagggcatcatacgttttgtaaacgtccaccccccagggggcaccaccctccacttttgcacaaacaaaaccatatgtgctagtcaaggccctggatgaagtcactcttctgaaattttggcctgtgcaaaaaattcaaatgcaaacttgcatcacctctgggaagacagtgggtacatttctttggctgcgctgtttctcattctctagatgggccctggctgcttggaggtaccaggctgaggctcgttaccactgactccagggcactccgacggcctcttcattcaccacccgcagctgcaggctggcatggtggtacattctgggagccaggtgcagccccggctgttcagactcagaagaggattgggaaatgacaagcatctgccctagggtttgtgggggttgtttctgtgtttttagyaggcctagtagtaggtctgtttacccaaagaggggaacaagttcctctgagaaggtgctctgccatgtgacagtcacgcattccagccccggctgttcattgcttctcagcatctgggggctggtgtggaggaataagcctgccttgggggaacccaacttttcccccgagggcggataattgcaaaggccagcacctgtctctgcagatggggtccttccccgggaccctgcccatccctggggtggactttcaccactggaaacctggtctagccacttctgcctcatgcttgggcagaggctgaagaagcctctcaaatgatcacagatacaagacgccatgtgcaggtggggacttggctatggcaaaccgctagccctaggttcttcctttcccttcccctcrcatgttacggcaggcccgacaacggggcatggccaaagcaggctgtgaactcagctgctccacgttcacccacaggccaggcataaacactggcaggcccgtgtgcccaaagtaaatgtttttaggcagaaggcacaaacactcaagaaatagctgcctgcctcagtcccaccaacatgggctcctcagatacatgagcagcacarcaaattcttcttggctctgtmcacagtctgatttctctcacctctaaaatgggctcacaaccctcttacctcttccttccctctctaccttccagggctatggtagggaccaaggagctgacatgaaagaaaatgctgcatgaactacagcatgctcttcggactctggttatgatgatgatgattaaccagagtgtcccatcccctgggtggcagcaattggttgtgggggggtaatraccccagccagctaatctgtccttcctaggtcttctctgccacagctgttgagggtgactgcctttctgctgggtgtggtatgtgctgagactggagctgctggcagccccctcacttaccctatgaggagaagagagtgttaaaggtacagagagactggctgggtgtgatggctgatccctataatcccagcattttgggaggcccgaggcaggaggattgcttgaggmcaggagtttgcaaccaggctgggcaacatagtgagacccccgtctctanaaaaaaaaaaaaaaaaatagctaggtgatatggtttggctctgtgtccccatccaaatctcatcttgtagctcccataattcccacgtgggagggacccagtgggagatgatcaaatcatgggggagggtctttcccatgctgttcttatgatagtgaatgggtctcacgagatctgatggttttaaaaacaagaatttctctgcacaagctctctctttgactcctgccatccatgtaagatgtggcttgctcctctttgtctccccagccatgtggaactgtaagtccaataaaccagtttcttttgtaaattgcccagtctcaagtatgtgtttatcagcagtgtgaaaacagactaatgcagtaaattggtaccagtagagtggggcattgctgaaaagatacccgaaaatatggaagcaactttgcaactgggtaacaggcagaggttggaaaagtttggacggctcagaagaagacagcgaaatgtgggaaagtttggaacttcctagagacttgttgaatgactttgccccaaatgctgatagtgatatggacaataaagtccaggttagggtggtcccagatggagatgaaaaatttgttgggaactagagcaaaggtgactcttgttacattttaccaaagagaatgggggcattttgcccctgccctagagatttgtggaatgttgaacttgagagagatgatttagggtatctggtggaaaaaatttctaagcagcaaagcattcaagaagtgacttgggtgctgttaaaggcattcagttttataagggaagcagagcataacagtttggaaaatttgcagcctgacaatgaaatagaaaaaaaaaatccattttctgaggagaaattcaagctggctacagaaatttgcataagtaatgaggagcccaatattaatccccaagacaaaggggaaaatgtctccagggcatgtcaagggtcttcacggcagcccctcccatcacaggcctggaggtttaggagaaagaaatggttgtgtgagccaggctcagggtccttctgttatgtgcagcctagggacttggtgtcctgtgtcccagctrctccagctgtggctgaaaggggccaacatagagctcaggctgtggcttcagagggtgcaagcctcaagccttgacaaattccatgtggtrttgagcctgtgagtacacagaagtcaagaactgaagtttggaaacctctgcctagatttcagaagatgtatggaaatgcctggatacccaggcagaagttttctgtaggggtgaggtcctcatggagaacctctgctaggcagtgtgaaagggaaatgtcgggtgggagcccccacacagagtcccamctggggcaccacctagcggagctgtgagaagagggccaccatcttccagatcccagaatggtagatccactgacggcttgcaccttgcacctggaaaagccgcagacactcaatgccagcccatgaaagcagccaggagaaaggctatactctgcaaagccacaggggtggagttgcccaagatcatgggaactcacctcttgcatcagcatgacctggatatgagacatggagtcaaaggagatcattttggagttttaagatttgactgccatgctggattttgaacttgcatggggcctgtagcccctttgttttggccaatctctcccacttggaatggctgtatttacccagtgcctgtacccccattgtatctaggaagtaactaacttgcttctgattttacaggttcataagcaaaaggacttgccttgtcttggatgagactttggactgtggacttctgagttaatgctgaaacgagttgagactttggaagacggttaggaaggcatgattggttttgaaatgtgaagatatgagatttgggagggggcaagggcagaatgatatggcttggctctgtgtccccaggcaaatctcatcttgtagctcccctaattcccacgttgtgggaaggacccggtgggagatgactgaatcatggaggtgggtctttcccatgctgttctcattctagtgaatgggtctcacaagatctgatggttttaaaaacaagagtttctctacacaagctatttgcctgctgccatctggggaagttgaggctgcagtgagctgtgatcgtgccactgcagccagggtgacagagtgagaccctgtttaaaaaaaaaaaagaaaagaaaagaaaaaaangtaagaaagagagagagaggtaaagagagacatgtagccctcactacgctcactatgcttgagcacctggatgtagctatgcctgaagccagataaaccctgggatttactggtacatgagccaactttcctttttctgcttaagatagtttgacttgagcttccaatgtttatgactaaaggaattccaactatctcttggttattttaataatttatatattagttttatgatcataaaataaagtttttaagagaagaagcctggctaaagtttctttaagttagtatacctatcaatagtatgaggaagcagaaaaagtattgaacarggaaatcaggcaacctagattctctgctggacccacaaaaattgctgtatgactttgaacaagtttcttaaactgtctagactccaataaaataaagaatcagagttagtgatatctaaggtatcgtatagtgctaaaagtctttgcttctataaaagaagacctaattagtctgatataaattgttcttaaccaagactttttatagaaatgttaagaataaagactaataatttaaaacatgtcaagcacttataataaaaccctttaaattgacaacttacatatgagacgtcctcatatatacatgcaaaatattcattgcatcactcactggttaaattggaaaatttagaaacaaaaattgagaacagcccggttagacaaattcatacaatggaatattatgtaattacaaaaacgaaatgaagaaactttatattttgctgtggacaatatctaaggcacatttttaattgaaaagtgcaaaatccaaagtggttgtgctgtgtaaaaagaggagggaaagtcagatagatttaattcctggtgcawgcatggattatctcttgaaagaatctcaaaaaaaaaaaaaaaaaaaaaaaaaacctgctaccactgattacctttggagagactgggtcttatttttcatgatacagtatatccttttatcttttgaatgtcaaaatatgtgactgccaggcacagtagctcctgcctgtaatcttagcactctgggagaccgaggcaggaggattatctgaagccaggagtttaagactagcctgggtagcatagtgagaccctgtctctacagaaaagacaaaattagccagacatggtrgcatgcacttgtagtccccacacactgaggaggccaaggtggaaggagtgcttgagctcaggagttggaggctatagtgagctcattgcaactactgcacaccagactgggcaacagagcgtgaccctaccctctaaacaaaaattaaaaaataaaattaaaaaaactgtacatgtaactgtattacctactcaaagtcaaataaattttggaagtttttaatttaaaaattacataaggcttttttggtacttatggtcatgtcagggtgacatgtagcctagctacctgtaagtcttcgagaccagcatttctcacacttcatcgtgcattctgaggatgcactccaggggatcgtgataaaatgcaggttctgatgcagcaggtctggagcaaggaccaagcttctgcacgtctgacaagctccaggtgatgctgccgctgcaggccaggaccgcactttgaatgtaggtctagaaccacactgatcaatacggtcaccactagccacctgtggctactgagtgcttgaaatgtggctagtccaaaaagagatgtggggatgtgtaaaatacacaatggaattgaaaaagagtatcaaaaaagatcataaatgattttatatcgatgacatgctgaaatgatgtttttgatatgttgggttaaatggaatatattattgaaattcatttcccctgtttctttttcctttttttaatgtaaccactagacaaagtaaaacaacacacatggcttgcattatatttctattgcatcatgctgtctaggagaacctgatctcctacaacctgcaacaaggcaggggttgggacaaccttgtcatcaccctggagtatttgcaagggtctgtaaattggtataaggacactggagacttgggagagagcacattgaagaatctggcacccactcacccctaacaaataaaacttctatttaagtgaaatacggattgaagcgaacaatcaaagcagtcgtaaccctggaactgtaggtagagcttttgcagagcagagtcagcctaagggaccagtgttgmaaggaaggagtgaggtacctttgccaggcagccaggcttgacagtctgcaatgctgtggtgacagtgggaggaagtatgtcaactctacttgcaccactgaacagcactgtccctaccaccctgagtcacatcccagcctggcaccctcaaaaacaaagatgcgtttaaagctaagggcctggggtaatcacttggcttgctgcaacacagacacaggtctgaagacagccaaatagtcagaagtgtaatattagatcagcataggccaggcatggtggctcatgcctataatcccagcactttgggaagccaaggcaggcagatcgcttgaggccaagagttcaagaccggcctggccaacatggtgaaacactgtctctactaaaaacacaaaaattagctgggagtggtggtgcacatttgtaatcccagctactcgggaagctgaggcaggagaatcacttggactcgggaggcagagtctgcagtgagccgagattgcacaactgcactccagcctgggcaacaaagctagaytctgtctcaaaaacatatatatattagattagtatagacataacgccaccaattccttctgtgtggccacagagcaatctgcatcacacgggtaaattgtaatctcaaactcttccatcctcatccaaggtaagtgcaatttttagtgaattggcccctttttgtgtaagatgctccaaagctcatacagggtaaggggtagagggtccacggtgtattatcttctccttagaaacatacaaactgggccaagatttctttacttgaggccacaagaaaagtatcacatgacccgaaagagctgcacatccttcagttctgttgggaaattcatcctgcacctgggctggggtgcagcctttctttcctccctggggtggcaaagggaaggcatgagacacccagaggggagaaaagctcaggtggacacgtggtcatgtttctactcagcaggcacagaggtgcacccttaagcatgatgtgggcatgttccctctcccagaaaacttagctctatggacaaaggagcaaaccaaccttgtcctgggcccagcccagtcctcccacctttcccatcacagacccagccaagctccagagggcactgaccaggttttatctccagcagccgcagttttggatcttcaggtgggtgcartcgtctcttcttgcgccagcagcgggcagggtatgtatacagctggcccggggcaaggcctgtggacagagacaatataaagattaaaggctccaggctggaaggggccttggaaactaccctgactaacccygtcattcacaaggagaggaagctgaagcccagagagaagtgacttgtcaacatcacaaagctgattgctagtggtggcaaggctgaatctaggtcatctgaccccaggaccctggctctgtcagctccaccatgctgttcagcaagcccatgccaacgagagccattgccttcaccaaaaccaattctgctctcctgcctggagagatcaccaactggaccttcagacaagaaggacctttgcagtgtctccaaagcagtggatctctatccactgcccctctatcctgatccaggttaagcaggttcccttcaaaacggagcagcagtcagttggcctactgtatggacagcctgggttgagaagcatcgcaaagagacagaaccaaaaacactagatctactcaaaggcgtctcccacccactcccagctgctggcagctcactgtaggcaaatggaggcttgtgtagcccccatgagaacataaacccactctggtgaccaggccacatgacctgcagagcccgcacacctctatatccccgcctacatgcctgggccttacaaaaaaaaaaaaataggcaggaggccaggggctgggcttacgtgccaccctgtgtgtgtgkcctttgacaccaacagcatcactgtcatgccaagcaccatgaggagccttcctgctcacccgacaacaattgtgtgtggctctggtggcagccacgggccttagaggaacagggacttctccatgccaggtcacagactattcccagggaaatggggcggggaagaggctgaggggtgaggaggcaggtatttgagactggctaggtaattttcagactggctaggtgatttgtagtcctgaagagagtgtctgataccccccataataaaccagcaagccaacaaatccytaataggaagaaaagcctaatgaagacagggacttttttgtcttgttcttgtcagaagccccagaatcagaactgtgcctgacacagagcagaaccaaactaaatactcattgaattaatgaatgaatatattgcagcttcctttaaaatcacaactctgtcttctgcaggtaaatgtggcacatggcagctgttggacgcaggcggcctaccacaaaagtgtcactgtgcacacctaggaccatggattcagaaaacatcagcacctgattcccatctgccgtcttccattttagggcccttaaaagttaagaagggaaactggcttcatttttcacctttgcagagaaaatctatgtaactttcattgctatatactcattcattcattttcatttttaccagtcaactctacccatttattgggatggggccaaaacaaagtcaattatcccagcattaaaggaaccaaaatactcaggtctctttatgtttaatcacacagctgctccacaggtcacaagattgtgaacaagttggaggttctgaccaccccacccctttggttcttagaaactagaactgacctggactcagaaatgtcagaattgaatgaccattggccctgctgttcctggctccaggggactcatccacccagatccaaagcatccaagagggactccagaagtggaggcccaggcctgaggccagagccccctgcaccccctctcccaccatggccatctctgggccttaggtttccttcgttccccagtggctgctttacggtgcttccaacctaatcaaacacaggtaagtaagagtgagctggcccccaccagcaccctccaaaggtctacgtggcaagagtgcaaaagtgtccacacttgtccaggtcctacaccctccctgagacagcagtcactgtgcttggtggtcagcggtaccagagaagccccaggccactctgcttggagctttagacccattcttctgggagaattcattttagcaactagtttgaatctccagaagaaggggctgtttttgttccattctttctctgctggattggagacactctgcagtgcaaaggaagagcacgtgagtcctgggaagcatcctaacacctttctgagcctattgcctcacctgtaagataagggcattgataacattaatacctacctcctggggctgttatggggatttgcttatattcaagagaaagctctctatatccacaaagatgacaaatgtcagttgttaattgtcatgagttagctgacctagtcttggactccacactcatgcaacatgacagaccccctgccccatccaccatgctgccacttggttctttagccatgaaggtggaaacaggcttctttttgatgtctgctttgaatccacctcatcacaacaagcaaatggtcgcaagagctctcttggagctccctggccccttccttgccctcctcaacaggctgacaggcaccagggttcctttataggaaaaacacgttcagccctggagttccacttacagagggaagagcagggccccatgagacttatgttgtttatctcagaacaggaggcagataactcaaagcatgtgtgtgtgtgcatatgtgtgcgtgcatgtscatgtgtggtagatggaggtggggaaggaggatggagtcacagctgctgtcagggaaattaaccttggggagtgagcctagggctggggaggggacatgaaggaggggaaacaagtggccaaagacaagaggggaaaccagtcctccctggtaaccaaggccactgccacccctcacttcacataccccactgagcaaactacttttctgttactttgagctgcaactcgagctacaacattcctgcccatgtgtaagcacaaatgtgatgcacaaagacacacacacacaatcaaaaactcacacacttgctgggagaactggctccatggaaatacctggcattgaaaggcttgatgcctttatggttagcagactccagacaaatacagctggttatgcacattgcacaagttcagcaggtggatcctgagggttctgggcatctctcacagacaaagcatgagctattcagaatttagaagatgaaatgggagagaaaagagagggaagagtggccgggtacagtggctgacgtctgtaatcccagtactttgggaagccaaggccagcagatcactgaagcccaggagttcaagaccagcctggccaacatggtgaaacctcatctctatcaaaaatacaaaaattagccagtatggtggcgcatgcctgtaatctcagctattcgggaggctgaggcaggagaattgcttgaacccaggaggtggaggttataggagctgaggtcatgccactgcactccagcctatatgacagagcaagattctgtgaaagamagaaagacagaaagaaagaaagaaagaaagaaagaaagaaagaaagaaagraagraaggaaggaargaaggaaanaaagaaagaaangaaaaaaagaaagaaagaaagaaaganagaaganaagagaagagaaagggagagggaaagagggggagagagggaaagagggggagaaggggagagagggagagaggagagaagaggggaagaaggggagagagggagagagggacagagggggagaaagggggagaggaaggaaggaaggaaggaagggaggaagggagagagggagggagggagggaggggagaagaatgatatgggataggaacagcaattgaaatggggaagaaaaaaactgaagtagtttcatctttccccatccagagctgaactgtggcagttcaagccccccagggaaaggctctctctctgcaggatctcagagaggtggacccacagctgcccctgaaacttcctttcaatggagaatttattatgtcacaggacacagtgtcccactgtcggccaactcttactgtgataaagagattcaccatgaccttattttgaatcaaaatctatctccctataagttataccaatttgtccaccctctgttccaacagcaaacagctacatcccaatcctgcatcccatatatctgcttgggtttgaagggcagctaaccaagaagccgaggaactaaagaggaataagagttgtaggaaagagttagtgactacccctgctcagaaccgggtaacaggatcaaagtttccaaatagaaaatgacaatacaacaatttaaaatacaatttaaaaaaatacaatataatacctatttacatagcatttacattgtattaggtattataagcaatctagaaatgatttaaggaatatgggagaatgtgtgtaggttatatgcaaatactatgccattttatataagggacttgagtacccacagattttggtatcttctggggtcctagaaccaattcccagtggatactaaaggatggctgttatgtatataacatactatcatttatttaacaaatggggatacacacatattcagacaaatatatgtgtgtggtgtgtttgcatgtttttttttatgggggtataagccaaaagctaaaaaaaattacctagagagagagcaaaaataaaataatagtagcaagaaaaagagaaggacgaagaggaaattgcctatacgaaaaagaaacagggtaaaagtgaagatacagttagactttctcataatataccattggaacaatgcaaatattttacacaattataaagtaaaattaaattaaaataaaaagcatacatccgtttctgactaaaatggagtataaagaccagatttagctcccacctaaaaccaaaagagaggaagaaaaaaatcaacaacagttttgaagacaatgaacatcaggcattgaaggacagtgatccctgagacactgaaaacaagcaagataagccctgtgattgccccagcttacagccttaagagagtctccagactggaacacaaggaggaggaatacaggtggagacctgcagattccccacgtttgagttgaagagaaaatgccaagagtctgaggagaccacagtgactagaacccaaggaactgaagggtaaacaaaagagagctgcacagagaatgtggagatccagagggtccctttcaagtattcagcttagcgttgatccatttatgcctgtgaggaaactagataggactgggaaaagaactacccaaaaagattagaggtaacagcgctcggtgtgcacaagggggcggaaatagtctgtttccaccagccaatatggaaaactgtatgattcccggggtactgggtagagtacagtagaaagatcttgcctcactaatagggaatacttagccctagactaagtactgctctggctccacctaacaaatcttaaaagcaagacaagaaaacatcaaactgttttcaaataacttaaatatgtcccaaaacaatgttcaagaacatttataggaataaaatatatctacagcattcagcaaggtaaaattcacaatgtgaggcacccaacccaaaattacaaggcatgtaaagaagctggaaaatatgacttatmataaggagaaaaatcaatcaattgaaaccaacccagaactgaaactgatattagaattagtagcaagaacattaaaacattatttgtatgctctgtgttcaagtttagtaaaaatttgggagatacatatgtatttttaagactcaaatttaacttctagaaatgaaaactataatgtgcaagatgaaaatcatatcagagggagttaatgtcagattagatattgcagaagaaaagacagataaacttgaaaacacagcaatagaaactattccaaaatgaaacccacaggaaaaaacagaaaagaaaaaaaaataatggcataaatgagctgtggggcaacttcaaacagcctaatatatgtgtaattgaagaaagggaagaaaaaatatttgtagaaataatggctggaggctgggtgcagcggctcatgcctttaatcccaacactttgggaggccaaggtggaagaatgccataagcctgggagtttgagagcagcctgggcaacatagtaagatcctgtctccacaaaagagagagagagagagagagatgaaagagagacagagagagacagagaaagggaggaagggagagagggaagaaagggaaggaaggaaggaagaaagaaagaatttaaaaagaaataagggctggaaatttctgaaatttgatgaaaactataaacccataggtctaagcagctcaataaagctaggtacaataaacattaagaaaactacagcaaagtatgtcataatcaaaactgctcaaaaatagtgataaagagaaaatattaaaagcaaccagagaaaggaaacatgttaacatatacaggaacattcttatctttgcaatgcaagcaagaaaagagtggttcaacatccctacaatactgaaagggaaaaaaaaacttgtcaaactagaattctatacccagctaaaatatctttcaagaactaaggcaaactaaagatagtttcagatatacaaaagctgaaataattcatcatcaacaaacccacactctaagaaatgttaaaaagaagtactttaggcagaaggaaagtaataccagacctaaatttggatctacacaaaggaatgaacagcatcagaaatggtctagtacatgaataattatacgagatgtttttcttattattttaaactcattaaaagatgatcaactatttttaaaaatacaatgatggccgggcgcrgtggctcatacctgtaatcccaacaatttgggaggccaaggcaggcacatcacctgaggtcgggagttcgagaaccgcctgaccgacatggagaaaccccatctcgactaaaaatacaaaaattagccaggcatggtggcgcatgcctgtaatccatcaacacatctactctgactctgaactcctcctgccttccttttataagaacccttgtgattacattaggcccacctggataatccaagattatcgcaccatctcaaaatccttaatcctgtcttcgaagtcccttttgccatgtaaggtaacatacgcacagatttcagtaattaaaatgtggatgtctgaggtgaggaggggccttattctattaatcacagtactattgtagactccttatactattcatgaaatagaataatataatttgaaagttaactataattaaagatgtacactataaacactaagcaatcactaaaataacaacaaaacaagagttatagttaataaaccaacaaaaaagagagaaaacataatcacattaaatgtaaattgcctaaatacccctacttaaaaaagattgtcagattacatgtaaaaagcataacacaactatatgctgcctattaaaaaactacttttaatataaagatgcaaataggcaagaagtaaaagaatggaaaaagatatttcatgttaatattaatcaaaagagagctggagtggctatattggaattagacaaaggagatttcagataaaataatattaatagagattaagaggattattttataatgataaaggaatcaatttattgaggatataacaatactaaatgtttatacacctaataacaaagcttcaatatacatgaaacaaaaagtaatagaattgtaaggagaaataagcaaacccacaattatagtcataagtttcaataccctacctctcaatgattcatagaataaatagaaaataaggatgtagaagatttaaaaaacattatcaaccaatttgacctaattgatatttatagaacattccaaacaacaacagcaaaacacaattcttttcctgagcaaacagaatatttaccaaggtagaccacatttggtgccataaaacaagttgcaataaatttaaaagaatttgaaccataaaaattattctctgaccatttggaattaacatggaaataaataatgggcacaactttggaaacgtcccaagtgtttggaaactaaacaatacagttctaaataatccatgagtaaaagaagaaaccaaacagaaaaatattttgaactgaatgaaactaaaaaccctatatcaaattttttaaatgaggcttacatagtatttatggggaaattatatcagaaaatgatgtagtagaaaagaaatatcttaaatcaatgacctgtttacaccttaagaaatagataaacctactatgtaccataaaaattaaaaaattaaaagaaataagaaacagaagagcaaattaaatccaaagtaaatagaaggaaatataaagatcagagcagaaaaaacaattctaccaaaagctatttatttgaaaagatcaataaaattgataaacctctagtcagaatgatgaggtaaaaaataacattcaaattaacaatataatgagtaaaataatatgccaccacagattctacatatattaaaagagtaatgcagcaatattatgaacaactttgtgcaaccaattaggagaatgtagataaaagaaacaaaatcacatactaacaaagcttactcaagatgaaatagataacctaaatagccctatatctataaaataaattaaatttataattaaaaacattacctcaaggaaactgccagatccaaatggattcactggtaaatgttataaaatatttatggaagaaataataccaattctatataaagtttcagaaaagtaaaaatgaagaaatacttcccaactcattatatgagaccagcatcaccctgacacccaaaccagacagacattacaagaaaactatagactaatatctctcataaacatagatgcaaaaactctaataaaacttgagcaacatgaatctaacaatacattaaaaagataaaatagcataacaaagtggggtttatcctaggaatgtaatgttggtttaacattcagaaatcaatcaatgtaactcattatgttaaatgtaaacttaagatattaaatttaatcaaccattcctacataatgaagcttccatgaacaaaagaaaaaccacatgatcatctcaatagacacagaaaatcagatgacaaaatcaaatatccatttgtgatttaaaaaaaaaaactctcaaactagaaatagaagggagcatcctcaatctgataaagaatatctacaaaaaattctacagctaatgtcatacttaataacaaaaaaataaataaatgctttctctttaagatcaggaacaacataagggtgtccagtctcaccacttttacctaatattatgttggagagtctagccagtgcaagagacaaataaaataaataaaagttattcatattaaaagaaagaagtaagttttctttatttactattcaggttatctactagcaaactaacagataatcaactatatagaaaatgctacagaatctatagaaagctattagaactaatgagtttagcaaggttgcaggatataggaagaatatactaaattaattgtttttctatatattagcaaacatcagaaattaaaatgtataaaaatttatttataatagtatcaaaaagtattaagtgcttagagacaaatctgacaaaaatgttaaagatctatacactaaaaattaaaaatcattgatgagaaaaattaaagaagatattaataaattgaaagatatgccatattcatgggttgcaagactcaatactgaaaattgtcaattttccccaaatggatctatagatgcaagacaatcccaaccaaactcctagccagttttttgtagaaattgacagactgattataaaatccatatagaagtgcaaaagacctagaataatcaaaataactaagaaaatcaagaacaaatttagagggctaacaccacctgatttcaaacattataaaactataataatcaagacagtgtggtaagagtataaagatagacaaataggtcaataaaacagaactgagagtccagaaataaacacacatatatgtggacatctaatttttgacaagccaattaagtggagaaagacgagtcttttcagcaaactatgttgaaacaattgaatatccatctgcaagaaaataaactaatgcatactttgtaycatatacaaaattaactcaaaatgaatcatagacctaaatgtgaaacctaaaattataaaattttaggaaaaaaaaataagagaaaccctgaccttgcattaggtagtaatttctcagacataacatcaaaagcacaattcatgaaagaataaattgataaactggatttcaccaaaattgaaaacttctgctctttgaatgagactgctaagttaatgaaaatacaaaccacagattgtaaaaaaaaatttgcaaagcataggtctgataaacttattgtatctagaatatataaagaacaatcaaaattcaataataagcaaatagctcaattttaaaatggacaaaagatttgaactttaccaaagaacatatatggatggtgtaatattgtgatataatgagaaatgtatattttggtcttaatccccacttcctggcacacagttcctaaaacccctggcatctccaagtgatgtgtctttttatatgctaatgagatgaccctggctgggacctgctggatagcctctggataagggattataaacagcggagccaaccacaagattagcaggctgtaccttttagccccaactctaacttcccacctctgacctccaggaagaaaagaggcactagtagttgagctagtcactaatggccaatgatttaatcaaccattcctacataatgaagcttccatgaaaatccaaatggactagattcagagatctttgggttgatgaacatgtgggggtgctgggagggtggctcacctggagaaggcatggaagcttcatgtctcttttccccttaccttgccccgtgtacctcttccatttggctgtttcagatacatgtccttcgtaataaactggcattytagtatgcaaactattttcctgagttgttttttttttttttttttttttttttttttgaggcggaatgtcgcccaggctggagtgcagtggcacgaactcggctcactgcaagctccgcctcccgggttcacgccattctcctgcctcagcctcctgagtagctgggactacaggcgcccaccacgcccagcttattttttttgttgtattttttagtagagatggggtttcaccgtgttagccaggatggtctcgatcttctgacctcatgatccacccgcctcagcctcccaaagtgctgggattacaggcgtgagccaccgcgcccggcctgttttcctgagttccagcaaatgatcaaacatgaggggcagtcatggaaacctccatttatagcccataggtcagaagcacagctgacaacctggacttgaaaytggcatatgaagttgaggcagtgctgtgggctgagcccttagtctgtggaatctgacgatatctcacagtagatagtgtcaaagttgagttaaactgtggaacacccagttggtgtccgcagggaattggagaattgcttggtgtaggggaaaagacatccacacatctgctcacagaaatattgagtaaaagtatagagaataaaacagtttattttccctcacagatggcaaataagcacatgtgaagatgctcaaaatcattattaactaggggaatgcaagttgaaactgcaatgaaatactactatatatctattagaatggctaaaaaaattttcaaactgaccacaccaagtgttggcaaggatacaaaggaagtggaactctcatatattgctggagtcaatgtaaaatggtacaaccactttggaaaagagcttggcagtttctttaatagtgaaacatctatctctcttatgatctagttgttctactcctaggtagttaacctctcaaggagaaaggaaagcatatgtccattcaaaaacttgtacacaaatgttcatagtggcttgatttatagtagtcaaagactgcaaacaaatccaaatgtccatcaacaggtgaatggataaattaactgtgatacagccatgcaatggactactactcagcataaaaaggaattattgatatagtattaattagtaattatgctaagtgaaagaagccagacatgcccttgtccctaaaaaagggagtacacaggccgggtgcggtggctcacgcctgtaatcccagaactttgggaggccgaggcgggtggatcacgaggtcaggagatcgagaccatcctggctaacacggtgaaaccccatctctactaaaaatacaaaaataattagccggggaggctgaggcaggagaatggcgtgaacccaggaggcggagcttgcagtgagcagagattgcgccactgcactccagcctgggcaacaaggcgagactccatctcaaaaaaaaacaaaagggagtatacagtgtgtgtttctggtatagaaagcaaatcaatggcttctctggggagggagtaaagaagggtagaggcatggagaagcgcaggaaggatagatttctaaacacataggaaacctttgcgagtcatggatatgttcattatcttgattgtggtaatggttccacaggtgaatatatgtcaaaacttatcaagctggacacattaagtatgtgcaatttattgtatgtaattatacttcaataaagctgttaaacttttttaataacaaggcaatctcagggacttctgcttctggaaagatgaaatagatacacttttttatattcctctcactaagcacaactaaatatcctggacattattcatagaacagacataagaaataactgaaagatgaagggaaccagtcagaccagctagggactttgggacctgagaaacaacagggtgggtggtgagctccctgggtattattttatctatctacctatctatctagctatctaactatctagctagctagctatttattgagacaaagtatcactctgtagcctgggctggagtgcaatggcgcaatcctggctcactgcagcctcaaactcctgtgcttgagcaatcctcccacctcagcctcccaagtagctgggactacaggcacgcaccaacacacctggataattttttaaatttttatagagacaaggtctcactatgttgcttaggctagtttcgaactcctgggctcaagcaatcctcctcctttggcctcccaaagtgctgggattacaggcatgagcctgtgtccagcccgatcttgggtctcctttatgcctcatatatcctggactggattctggaaaagctgataacccagaaacaccaacaaatgaagaccaaaaaagacctcaagaaaatcctgctctctctagccagagaaccaggaaaggaccagcctagcaagacaagcaggcatcccaatagctttgctgggttggtgtcagagaaggccaagggaagagctggtgccttgtggtatcagtagaggccctcctcctcccaagtaggataataccagtagaggcctagtggggagcctgaactcccacctccactcagcaacaacaaggtgttcttcccctgttaaagaggatgtcaacagaagccaagtagagaagatggatttccacatccatctgacagtaataaggggagcctcrcctcccctactagcatagcttgaaaggagacctgctaatatagaagatttaaataatatctagcgtctcataayataacagccaaaatgtccaagattcagtcaaagccactcatcttatgaagaaccaggaaaatctcaaatgaggaaagacacagacaccaacaagaaaataacaaaaatgttagaattatctgacaaggatcttaaagcagccatcattaaaagtgtttcaacgagcaattatgaacacataaaacacattcagcaaagaaatagaaaatatgaagaaccaaatagaaatttgaaaactgaaaaaaattgtaacaaaaaataaaaaagctctcaatggattggcttaacagcagaaggcagaggacagaataaagaagcaatgaacttgaagagagaactatagaaatcacccaagctgagcaacagagagaagaattttaaaaataaatgaacacagcctcagggacttatgggactataacaaaagatctaacatttgtgttgttgaagtccgagaaggagaggggaaagagggttgaactgaagaagtattcaaagaaataatggctgaaaaattcccaaatttggcaaaaaaaaaaaaaaaaaaamcccataaacccacaggttgaagaagctgagtaaactcaaacagaataaacccaaaaaatctatggcaaaacacatcaaaatcacgtttctgaaactaaaaacaaagaaaaaacttgaaaacaatgagagagaaatgacaccttacttataagggaaaaaagcatttaaatgacagcagatttctcatcactaaccatcagaaagaagtggcaaaacctttttcaactgctaaaataaaaggactatcaactcagaattttatatccagcaaaaatatcctccaggaatgatggcaaaatcaagacattctccactgaaggaaaactaagaagttgttaccatcagatttactctaaaagaatggctaaagaaagtactacatcagaaagtaaatgctaaaagaaggaatcttggaacttcagtaagtaagaaaaacaacgaaggagtaaaaatatgagtaaatacaataaacgcttctcttacgttttctaaattatgtttgatggttgaagtaaaaattataacactggtatggttttcaatgtatgtaaaggaaatgcttaagacaactatattataaagggaggagggtaaaaggatttaaataatgagtgttgggtggtaatagaatagttttgtatcttgattgtagaagtggttacacaaatctagacatgtgataaaatggcataaagctacatatacacattttaccaatgtcagttttttggttttgatattgtaagatgtattaatcttggaggaaattggatgaagaagataggggatctctattatatttgcaactgcaaattgcaaatacagtcacaattgcaattattaattatttcaagataaaagttgatttaataaagaagaaattatatgaatcccctccccactcaaaaagcaaaccctgataagtgaaagcaaaatgaaacaaataaatccaactgtgtattgagttagtggcacaatcacacagaggaactatctcagtgaccttaaaggagagtaatttggctgcacatgtttaatggaatataccctaaggacaaaaagacttgcaaaaaaaagaaaatatcttaaacctttttcagtaatcttattgttaatagtcatattgtttgttctgatactgtgtgtgagtgtctgtgtgtgtgtgtgtgtgtgtgtgtgtgtgtgtgtgtgtaaaataaagcaaataagtaattacatcaatatcatttctaggattttttggtgtaggagaaaggagatacagaattaagatacttaagtaaaaactgtttaaatctaaattgaatgggatgtatcaacataatttcataatgtattttctcttaaaaagaaaaagaaaaaaacaaatgaatactatttcttagttctagtcactgataaggcctagaaacaatgaccaagccaggagcaatgaacagcactgcggtctctaagtaacttttcctacaaacaggagccaggatttcttcaagaaatagctgatttcagtcctggagaggaggaagygtacaggatgagcttgaaatatttcatcctaatattaggatggcwagaaggccatcagaaactactggggttgtttcaaaacaccagcactgggccgggcacggtggcttacgcctgtaatcccagaactttgggaggccgaggcaggcggatcatgaggtcaagagatcaagacaatcctggccaacatggtgaaaccccatctctgctaaaaatacaaaaattagcygggtgtggtggcatgtgcctgtagtcccagctactcgggaggctgaggcaggagaatcgcttgaacccgggagrcagaggttgcagtgagccgagatcatgccactgcactccagcctggctactgagtgagactccatctcaaaaaaaaaaaaaaaaaaaaacacatcagcactggccagaatcctgaatggccagagatgaggcaagataagcytcataagaataatagctacactggattaaaatacatcaaatatgtttaaatctgtgagttcctggtggtattcaaaaaaataattattattatattgatcgtctttggagaatgctagggaaccaactcattattttgaaaactggtaaatagaggggaaaaaagtcatttatcctgcctttcatatgtgaactgtatctcacaataactaaaattttaatgagggaatgtttttctttatagaagttgtagagctaacaaatgaagatataatgatagtcctggattgaatattaactttttgcaacccttaatgggataaagaatctaggcaattatcatgaagggctgctaacatcagtaaaagaggtaaccagactgtatgagcctcttgatgaaagtacacactaccactcaggagttgttcttaccaaaaaaaaatggaacctgaataaatctctagacctaactaccaattcacagkaataacaccatgggaacgcaaccaaatccttctgggaaaccctacagcgtaagcaacccagtgtcttcaacaagtaacatgcaaggaggaaagagagagaggcagagacagagagaaacccagagatgttaaaagacacattaaccagttgcaatgtagggttcccatttggatcctgatttaaactacagggggaaaaatgaatgttggccaaatatttgatgatattaaagtcttattgctaattatttgagctctgatagtgattgtgagtktgtttgtttgtttaagttctttaccatttagagatacataacaaaatatttacagatgaaatcacgtgcttttgtggatttgcttcaaaataaaatgaggtcagggagaaaagtaaggagtgcgtatagatgaaacacgattgaccatgagttgaacattgttgaagcagggctacatggggatgtgttttactattgtcttcagttttatatgaaggtgaaatttttccaaatgwaacatttttaaaaacatatccaggcagagccagaaaaatcacattcctgtagctgtctccctaataaaaaggtctttattctgttctttgcagcctagaagactagtgtcactgtagctgtagtaataacagtaatatcaataataataggccaggtgcagtggctcacgcctgtaatcccagcactatgggaggcccaggcaggcagatcatgagatcaggagttcgagacagcctgaccaacatggtgaaaccccgtctctactaaaaatacaaaaactagctgggtgtggtggcgcacgcctgtaatcccagcgactcagraggctgaagcatgagaatcacttgaacccgggaggcggtgagtcgagatcgcaccactgcactccagcctgggcaacacagcaagagtccatctcaaaaaaaaaaaaataacaataataataataatacccagcattttggaagcacatacttgctatgtgctaaactcatttaagagtttttataaattttctcatttaattcagacgaaatcttatgtggtaagtactattattattcacattttacagatgaggaacctgagggacagaagtttggtgacaaaggtaagcctcacacccagatctaatggcagatttccggcttgtaaccaacacccaaaggtaaaagatgaagattgctgtcatgtcctcagtcttgccttctttgggataaacacctttagctctttcactccccaccccaccccacccctgccacatggcttcaatgccccacaccatccttgtcacattccttgaaacacctgccaggagccataaaagtagctgagcttctttaaggtatctcagaggcccatgtgcagcttgccccaccccgatcctacccaggctgcctggtttcccagacaagctgcggtcctcctccctccaggctgggagcctgcacatgcgcatgtcccaggagtggcgcagctcacctgggcctcggtgcctcttctccatccagatgtagcagttgttctgggccaccccagtctgtgagtccaggaagggaagacgcacgctgcgctctgcacacagccgtgagttgtaactccggcagtgctcaatggcttccttgtagaactggtccccgagcctgccagagtcagagagtgaaggggtgaggccagggaagactgaaacacacccagagggaaacacacccagagggaaacacacctccctggaaagactgaagacctcccagttatgaagaccaaggcaatgagcaccaagagccttgccaatgagcagaatgcaactcaatgtcaggtcttgactagattttattttctatcccaaatccaccaggcaacttagaaactcctttaacaaagagcatgggcttccaaggatgaatcaccagtaagagagagctgtccatgttctaggaagcatgaggtcccactccagaagggaagtagctctggaacaaccttctgcatggaatctagaggacatcacacttctagaacctcctcactcatattagctacattttattctcagaggtcaccagcaaaggcactctaggtgaacccaaatcaccagcaaagatactcagttttccattacaacagaagagaaacactccatataaacaaaaactaggacagaaaaaacattctataaaagtagggaaattgcaggaagaagggggtgtagaggaacaggcaccaatcttttaaaaccatattacttaaagaaaaataactttccgatagaaaacaaacagaattcaacaattttaaattcaaaataattcaactcatggagtttaaaaaacaaatagaaagacctttctggtttgctagactgagaatctgattaagcacagtatattttacgttcctgactctttggtatttttggacacgtggtgatgctactaattttaaggtagtgtccttttcaaagaccaaaaatggagcattgatataattgatcaaatgcaaagcactaaaataatcaatgagatcaaatacctaccaaataaaacataggcacaggttaataaatgcctcaaagaaatacaaatgtaataacataasttatgccaggtaaattcaagcctcttactggrgtcggggggcagtggacgcaaaggagtggagtgtgggaagaagaagtaggaagggaaggagccacagagttcacaggggcaaaagggagaatcaagtgtttattctgaagcaacattatgatatctttttgttttggttctatgtagatttcagaaagccaaaatgagaggggaagtctctaaaaatatcatttcttaaccaaagtatttagaggaataaaaaaagcaaaattggggtgttgggttttttgggtttttttttttttttttgagatggagtctcactccgtcgcccaggctggagtgcaacggtgcgatctcagctcactgcaacctccacctcctgggttcaaacgattctcctgcctcagcctcctgagtagctgggattataggtacctgccaccatgcccggctaattttttatatttttagtagagacagagtttcactatattggtcaggctggtctcaaactcctgacctcaggcgatccacccgcctcagcctcccaaagtgctgggattacaggcgtgagccaccatgcctggcctcaatttcttaattgtggtaaaatacacataacataaaatttcccatcttaagtgtacagtttaagtgtacagttcagtggcattaagcacatgcatactgttgtacgaccaccactactatccattcccagaactcttttcatcttgcaaaactgaaacactatacccattaaacaataactccccgttccgcctctgcccccatctccagcaactaccaatctgctttctatctctatgattctgactactccaagtacttcataaaagtggagtcatacagtatttgtctttttgtgactggcttatttgacttagcataatatcctcagggttaacctatrttatagcatatgtcagaatttccttcctttttaagtcagaataatattttaagtcagaataatattttttaagtcagaataatattccattgtatgcatataccacattttgcttatccattcatctgtcagtggatatctgggttgcttccacattttagctattctgaataatgctgctatgaacatgagtatacaaatatcttttcaaaaccctgctttcaggctgggcgcagtggctcatgcctgtaatcccagcactttgggaggctgaggtgggtggatcgcctgaggtcaggagttcgagaccagcctggccaacatggtgacaccccgtctctactaaaaatacaaaaattagctgggcctggtggcagacgcctgtaatcccagctactcaagagtcgcttgaactcagaaggttgtggtgagttgggattgtgccactgcactccagcctgggcgacagggtgagactctgtctaaaaaaaaaaaaaaaaaaaaaaaaaaacctgctttcagttcttttaggtatatactcaggagtagaattgctgagtcatatggtagctctagttttcattttttgaggaaccaccatactgtttttcatggcagctgtaccattttccatttctaccaacagtgtacaagggttccaactactccacattctcatcaccacttgttagaaagcaaagttttaaatgcacttttctatactctttttaaaaagtcaacgggtcaggttctaacaaagagcttaaagcaaatatcttactgtgggaaaacacaaccctggaagcttctgaggcatcatttggaaattacttgttgacaagcatccaaaaaaaaacaaacaacaaaacaaaaaccctttgctcctttttcacctctgaacatcttcacattcataagggaggcataatacgctcagaaagtgtcctggcagttgcaaaaccaaactgtaatcaaattgtaatagtcacgcagctggaaatgaattggggaggggagatgaaagcccattacaatgctataaaactgaatggcacataagctgatgtaatcaaagctggtaacaaggatcatgagattgatcaaaaataaagaaccactttttacaaagtgtttgtgtcacaccagcttaaatgcttccttctgctatggcgatgtagctcagtggaacagaactttcacaggcagcttggcccagacaagatgacccaggctgttcagggtatcctggatgctccagcccccacccatgaaacagcaagcagccataccacatcgatagagaactgacaagaacatttgacagagaggtgtccaacgtgagagcagcaatctgttttcccaggaccttctgacagactgccaaaaaaaaaagatgttaattatcccaacctcagaaattctgctgaaaagagaacccataaaatcaggccccccaaaaaaacaaaatgaaaaattgtatagcaaaactcatctactggagatgatcactttcaaaataaatttctggaaaccaatacaaaagaaatctacacagtaggattccaaattggacttgtcctaatatgctagtaactcacttccaacagcgtcaatccagacaagaggaacaagaaactgaacttgctaaaaatgcaaagtgaggttggccaacactggtgctccacaccaactggatcgagaatgtcaaacaaagtggcacactgggcgaaaattaatttcatcttaaatactttctactttcataacatgcaatgttattagttacaagcatgctgggggaaaatgtatatttctaaatataatctttgtgtgaatgatacctgtcttatgtaaacagaaaagactttctgtggactggaacaactgtattaaagatcgaagctgcaaaaacatgacattcaacagcccctctaccatcatctccagggargtccttttaaacagaccaggtgttggcagagaytcggaaccaaaatttaaagcctttttcaagatataagaggagaaaagagatttcatcctccctgataaattcaagaagcacttctccaaaagttaattagccaaaatcgtcacagggcttgctatgctctctagaagaaaatcaatgactagttctccctaacccgtagaaagcaatttaaacagcagaggacaaatgtcctttccaacatggtatttctgccaaaaaaaaaaaaaaaaatcccacaatgatgggatcccaggagtgacatttacattaaagttgaaggcgtcagatggagcagggaaaggctggcagcaaatgactcatctgtggagtggtgaccagtgtaccctgggttggatcacacatgggacagtcccagccatcacctgcatgcaccaaactgagggggctggatccccaagggatgattgatgtcttaggctagaggaagctggcacaaggcagggtagaatgatgttcttatcaacaactgacttcaggctactcaaggctgcaatcagaaataggaaaggcaagggaaacaaattgctgggctccccaggctccccagacagcattctggttgcagcagtgctggctgcctagttctagggggctttgtgagtgatggaggtmcttctgtgatcccatctgaattgagaagccagmccagctctgagagctgagtgtttctacatgagatttccagcaaccctccttgagcctatctgtggagatggactccagggggccaaagaagactcagaatgggaaagatgagacttctccaaagtgactgccaaccaggctccaaatgtgatttttcagagcccatcaatcacaacccctctaagaccctctgctcctcttcctccaacctcctgctctcaagaccacacctgcttgctccgatttctcagatcactctcaggtccagccagacacctgggctcctccctttcactgtctctctggttctgtgctctgacctgaggacaggtgtcctgccataccagaaatgtgagtccaatagcaagtttctcatcttctgccagaagcctgctcccgcccactcaagtctcaatcctcctaggggcgggggtgggggtgggggccgaggctatgctgccctccctctccctagcaacttggccttgactctccccttgccttcaaaccatctggaactgagttatttcatttatcaggaagtcgtcctttctctccactccccctgtgtggccccaagtcccctttgctgtgtaaacaggaccttggcccatcactactatctgtgcacagaagcagagataagcagagctgaagagaagccctggcctgtggcaggattgtgggggctctccttcccccagaggcgcctcttcctcactrtgggcaccaagttttcctgctgtctcactcagctgttcacaccgccagagccgcccacaaacacacacgraagctcatctacaccaatatgctaacttcctgctatttgcatttaaacatgtttaactcaaactgttcatggaaagctccgtctcccatttagtcttttagaataactggcacacagggggcaatatctggcaaggtgcgggaaagtttttattttccttgaagtggtcctgttcctaatgcatctcttgaaagaagaccaagtttagtgtttgttacagactgaattgtgtcgttcctcctcacagaaaaaatccacatgttgaaggcctaaccctcaatgtgatggtgtttggagatggagcatttgggaggtgatatcatttgatatttacccctgcccaaatctcatgttgaattgtaatccccaactctgggggtggggcctagtgggaggtgtttagatcatgtgggcacatccctcatggcttggtgctgtcttcgtgatagcaagtgagttcttgcaagatctggtcatttaaaagtgtatggtgcctccctgctgactctctctctcttgctcctgtttttrtcatgtgacatgcctcctccccctttgccttctgccatgattgtaagtttcctgagggctccccagaagccaagcagatgccagcactgtgcttcctgtacagcctgcagaacgatgagccaattaaacctgttctttataaattaccaaatctcaggtatttctttatagcaatacaagaatggcctaatccaggaggtaatcaggtcaggaggatggagmcctcatgatgggattagggcccatataaggcagagacatgagcaagctctctcactctctcaatctctgccatgagaggacacaaaaaggcagctgtatgtgagctataaggaggactcttacctggaatctgaccctgctagcaccctcatcttgaacttcccagcctccagaactgtgacagacaattatttaagccaggggtcccaaacccctgggccacagagcagtaccagtccatgcctgttaggaactgggtggcacagcaggaggtgagctgtggggtacaagtgagcattgctgcctgagctctgcctcctgtcagatcaatggcagcactagagtctcatagaagcgcaaaccctactgtgaactgcacatatgagggatctaggttgcccactccttatgagaatctaatgcttgatgatctgtcactgtctcccatcaaccccagatgagactgtctagttgcaggaaaacaagctcagagctcccactgattctacattatagtgagttgtaaaattatttcattacatattacaatgtaataataacagaaataaggtgcacaataaatgtaatgcacttgaatcatcccaaaaccatcccctccccgaccccagtcggtggaaaaatgatcttccatgaaaccagtccctggtgccagaaaggttggggacttccggtttaagctacccagtctatgccattttaatacagcagctggacatgactgaggaagtgtttctggatgtttcccaaaaaagggctaaggaggacaggtgagagagattccaatcccctttccttccacattttttcttcttctaacaaagacaacaataataacactataatatcaatttcaactcawttcaatgtttagtatttgtcttctctactagactataaactccatgagggcagaggccacatctgcagagccactgcacacagacactcaggctgaacaactccagcaagtaccattcacatcagcgtcaatatgaaggccaccccctggagtggtggagcccagcactcctgcatacctgcctggccttcttgctgatttacccgcagtgttcagcacagagcctggcacataacaggtgcccagtaagtctccattgaaaagcatttgacaactcacattccactcacctagggcaggcatttaaattacagcaggaaggctaatgtggcatgcttgtgcacagtctgcagagtctgtgactggcaatttaaactggatggctgtccacttgcagcttcagaaaaacattgagagaatgtctgcattcactctcctgtagtcctcatcacccagcacctgggacattgcagcactgggtggcctaactgcaagcgctatagccctactcttacccatcctgacaaaaggaattctccctgaaactcagtgtttagtctttcaaactcctcagtgtagaacccaagatggctcccaatggtgcccaggttcctctgctgggctggggatgcacccggaaaaactatgtattggggtaaagtggaaaatcaagacttggaattggtcatgtctgagtccagctccacctcttaatagctacacaaccctcagcaagttacttaccctccctgggcctaaattctactactcacaatatgggtaatataatctctacttcagacctgagaaaatttaataagctagaacctctggcacacagacataaaagtctgmaatcaatagccattcctttctccttccccaaagtgcagtacttgctgccactttgtggcatgaccctctgcctgagcaggctgatacccaccatgtgatgcaacactcactattgcggtgtccttgaggctgtcggggacccactcaaacctctgtcccaggacagaaggcctctgggtcaccaaggctgagcctcaggcatccaggagagcagggcagctgatgcatggtgaccccagcaatccacccaaggactgccctaagcacagagaccacatctggcttgtttactgctctctcccaaagcctagtacatgctgggtcatgcctgccacattgggtaaatgatgartgaatgagtgaatgaatgaatcctcctctgacccccctgcatatatgaaacagacagccctacccctgaatctcaacaaaacactttacttatatccttcctcccacctggaatttttgtattctgtccttgtcctggctgatcttagcctagtcaagagctggctgaaaacttgcttcttccaggaaggttcacaggttatctctaccagtagggtttgctctctggcttctctgagctaccttatctgtcttactttatttttgatggtctttgccaccttccttatctctgctcacttaattagattggaagtatcttaaagacaggaactgagagctatgtgcttgcatgctacccaaccatgcacagtactgggaatgtagaagcatgtgatagatacattgcttgactgaactatcatgtcatcctcagcaaactaatgaaagcttcacagttgagaggtgcttggaacgttctaactttctccatgggaacatgaggtgagcctgaagttatctggctacttctccagagcccaggattaggcatctgaaaatagatatcctccaagttcaaatcctattgagttttttcccatatccttaaaaaaaggtcacttcagytcctgagattttcatttctccatgtgcaaattcatgctaccctgcaaggtgccacagaactgacattctccttctctgaactttacaagaagctcactgnttctcaatgctgctgacatcagacctatgccaggaraaccagctccttctctgcatgggtagaaatgcccttcttgtgcttagtgagaatgccatcaccacatgctccaaaagaatgctctcaaactcaggattgtgaaagaatcgctaaggggtgggaagctgtgcaattctgattctagaggcttgggatgtgatccagacatcagctccccagtgatcctgagaaatwtgagactagctgatctaaagatagctccccaacctctaaaacaagggcatgaatgagaggggacttgtgttgctcctcagccaccatgtttgaatggcagagctggacrgcccagttagcagactttgtttcattcagctggttttgtttctgtgggaaaacttctttcaggcagctggcatggattaccctggcagcactaacctgcagcagactaatcccacaaaagtcctcatccctaacaaaattgccaaaagccctggtcaaggcaaatgtatgaagatctgacatccttagtcattctgtgggtggctctgaccttcaaaacatctcaggaagggcacaytggggacaaaggtatcccttgggaaagttatgtccgacaaacagcttgaaccctaaaacatccatcatgacttcgatgtggctcagtctgatgttcaggcccagtagacccaataaatcccttttccagcatctaccctggtgaagacttttcagggacttattatgcaaagctgcctaagcaagacagaatttatattgaacctggccatgatttctgagccgccactgggtgttctgatgacatacacatctcgaggttgaagtcaaggagctgccaaggacawgagactggtggcaggataaaagcagtgtgattccttccagtaaataatggtggggtggcgggggaggtgggaaggggacgctccggggaggaagaggaccgtagcttttcttgtacccaaggtttgcctttcaaatggcatccagacgtgaccaaataaatctctcctctggaggctaaagaatgtgtasaatgcaacaaaagtgaggtggtggagaagcctgctttatctagggtgaatcatacctagaaagaaaacatgcatccgtcacagaaatttcattgattgagaaaatatttttagtttcctggtccacagactgagtccttcctgaaactctcactatgagctgggcactcggatgttgcctcctgagtgtgatcgcctatagaagcagactattgattagagaaaattcttagacaaacagatccccagccctcatctttgccactggaatgcaaagggtgctgccctccccagtaaagggaatatcggtctggtatttaacacggccacaaagaacatgttgttctatagtcaattctctatacagcagcccaagtgatttttttttttttttttgaaacaaggttttgctctgttgcccaggctggattgcagtggtgcagtggaggagtgtagcctccacctcccagmttcaagcaatcctcccacctcagcctccagagtagctgggactacagacacacgccaccacacttggctaatttttgtatttttttatagaggcagggttttgccatgttgcccagcctggtctggaactccggggctcaagcagtcagcccgtctcagtctcccaaagacctgggattacaggtgtgatccactataaccagccccagtgatcttttaaaaacagaaatcagggctgggcacggtggcccacgcctgtaatcccagcactttgggaggctgaggtgggtgggtcacgaggtcaggagttcgagatcagcctggccaacacagtgaaatcccgtctctactaaaaatacaaaaattagccaggtgtaatggcggacacctgcagtcccagctacatgggaggctgaggcgggagaatcacttgaacctggaagacagaggttgcagtgagccgagattgcaccactgcactccagcctgggcgacaragcgagactccatctcaaagaaaaaaaaaaagtggaaatcaggccatggcaktctctcctactaacacctccaatgtcttctcactgcactcagagcaaaatccaaactccttcccatggctacaggtccccaggctggctgggctcacctttcctgcttcatcctgtcccctgcctccttccccgctgggctccatcctcactgcactcctttctgttcctcttctatactaagggtatctcacctcaggacctttgcatatgccatctcctctacctggyatgacatgcttctcccagatcttcttgtagctgactgctcctctgagatgtcttcttaggttcaccctatctggaagtagcccaccccaccccaaccctgccctaccctttgctatctcatatactttatttttttcataacaccactatcaaagtttttctctttgcctactgatcatctatacacaactaaattgcaagtgccacgagagcagcgtccttgtctcatcagattcccagcccccaacgcaagacttggcacataggaaatgctcgacacatatcactcaacaraaaaatgaaagctctaggcccacctgcaactgacagcttgaatgataccgaatcctggccttgtagaaggctggaagtcagtgctggcaggagacccccwgcacagggaataagaatcacacagctgccaccacctgattcctggccctttctgcccaacacaacataaatgacagcaggtcagtggcacagtccacagtccacactcaaatcttgatcatggccacccacataccccaaacctggagagagactggggtgaggtagataaacgatgccattcaagacatcagacattgctttctatgcccaaaaggcacattccaggcctgatattggcaccggaaactagcagtgccagaagatggtctccaacatacccatcccatgtccctcaaagggcctctctctggactaacctcttctgcatggtctttcctgcagagctgatccgtgtcctcctgcagagccctgggcccacgggtggtgccaggggcagcggcaggatgggggtggggctgcttgacaggaaatcaatgggaactgaaggtcatccggagggcgcagtctccccatcackcacctgctggcatgggatttgtggtcctgacctcgcttgggggcctctgccctcctgtcagagttggttaaaatcagcctgcagaagcaaatgtcctgcacaccaaatgatctccaggcagcccttctaagggacatccagccaaacaaagaagcactgagtctcatttcacccgccgcaaagttgagagtcaccccaatctctcttggcagcctcctaggaaaactgtctcagacctgccatttttggaggcacatacttgtaaatagaacaaagccagactgaccaagaggctggttatgtccccaaacttaagttgcctggtggtggaggaagtaaaaatacactgggaaccaagatgactgaaactgaaatcttgagtgcaccctagaaatgcctaaatctgccctcaacacctctacatgccaggataacgacaaaggataccaaaacctctgtactgccggagggaaatctcattttcttctcatcccaaaaaatactggggagcttggctgaatctagaatctgattttccttcccccactatacttattttcccaggttcccattctcccttgcttcccagacctttcccctctaccatcttctttcccaattcgtccacctcatcaagagtcatttatcatacaggccaggagcaaagcggtcagcctaagtctccaattcaaaagttgaaaatgggccaggcacaggggctcacgcctgtaatcctaacactttgggaggccaaggtgggaagactgcttgagaccaggagttcaagcaccctggccaacttggtgaaaaaccgtctctactaaaactacaaaaattagccaggcttggtagcaggtgcctgtagttccagctacttaggaggctgaggcaggagaatggcttgaacccagaaggcggaggttgcagtgagctgagatcgcaccattacactccagcctgggcaacaagagcaaaacaccgcctcaaaaaaaaaaaagttgaaaatgaatatggtatgaaaataaagaaaaggccaggcacagcagctcatgcctggaatcccagcactttgggaggccaaggcaggagaatcacttgaggccaggagttgaataccagcctgggcaacatagtgagatccccgtctctacaaaaaaataaaaaataaaaaaatgttttaatgaagaagagacaccctggacatatttacagaaggataacaggatgctggttatagtagcaatagtggcatagctaatatttattgagcatttactatgtgtgccaggcactgttctaagcactttacatgtattatccccatacaacttgtaattgtattattcccatacaactccatgattttatacccaccccctcacacaccccactttacagattggcaaactgaggcacagagagtcttacgtgatttgctaaggatctatgtggccttgttaatacattacagtcttgccagaaccttactcttggccactgcactgtcagcctcttacaagggcgccattaccccctcacaatgagttttgcctccagaactagaataacctgaacacttcctttcttggaggcactagaacacttcctttcttggaggtttctatcagcatcaccaacttgctagctaatcttagctatttcttttctttgtgcctcagtatcccaaactgccaaatagcccagaaataaaccttcttatcacagagccacctctcagtaactcaaaaaaagttaatatggggcttcctgaaaatatgccatcagagaaatacaaaatgtcattatgcagtttagaaaccaaatccatcccaaatgtgagcaaggggcgatggacttgaagaggccctgtggttctgaacatcaactaaggcagaaaaagagaaatgccagaaagtcataaactaaagggtcagattaaagaatcccagaatgttagacactgtctagtctggtgcctggttttattgcaaaggaaatcaataaccaggccaggtgcagtggctcacgcctgtaatgccaacattttgggaagccgaggcgggtggatcacctgaggtcaggagttcgagactagcctggccaacttggtgaaactccatttctactaaaaatacaaaaaattagccaggcatggtggtgcatgcctgtagtcccagctactcaggaggctgaggcaggagaatcgcttaaacccgggaagcggaggttgcagtgagccgagattgtgccattgcactccaacctgggcaacagagcgagactccacctaaaaaaaaaaaagaaaaagaaaatcaataaccacagaggtgaggtgacgtcctcgggacataccgaggcagagctgggatcagatcctcagtccagactcctagttcagggattcctccatcgtttatggcaagggtcaacaaactacagcccctcggccaaacatagcccaggactaatttttgtaaataaagttttatgggaggcaagccatgcccatccgtttacatattgtctgtggcagcttttgtgctgaaatgacagagtcgagtagttccaacagagaccatgtggcctgcaaagcctaaaatatttaccatctggacctttacagaaaaagtttgccgactcctggtttttaacataagccttgaataatgaaaagcctccaccctcagaatacaaaataatagaataggaaacctaagagtcacacagcttaagcagatagttttacaattatctcagcttggtacaacctaataaaaacccataaatacagttaataataaggaaaacaagcactagctcaccctacctatttaataattattgttaactacagcaagcaaaactcatagctgaaaattcgtttgtttgcttttttctagcctcccttgaaagccctgtttcatctaggaaatgctgttggccaatgggcgaaaggacacatcctagaggcgcacagccctaatttcctcctgttgagttgcaggctgctgctgaggcagctgaagacttgagagcattgccctctctccagagcggactcagagagagttgattttctctgtcaaaggcgatggcgccaaaaccctcctgtgcccctcactccagatagaaccctcaggaacagccaggcatggaagagactgtctttatggcttcctctccctactgggcctccatgccctgcttayacccctttcctccccagaaagtgatcaggatatgcacacggcccacagaagcccagcccacagctatgccatcattctatcatcccatggaatagggaaaagcgggtctgcccctgttaggctgatgtgggaatcaagagacctggattccagattggagttggaacttagtcactttgggtttttggcaaatctctcaagccctctgggcccaggtctcccacgtcaaatggagagatcgtcttcacatattccaaatgatggaacacgggcagagccaaattaaggggtggggcaggccaaccacgtggcacccgggctccagtctctaatcacactaagtcattascaggaacatagaaaggtttactagtgtcactcaggcagagaactttgagaaataggacctggctttcatggaatagtccagttcgcatcaaggtcccactgtaatgattattacacttttccctctcaaaagcgcccttgcttggctgataaatgataaagtcaccctactaataagctgtttgtggtgggagtgaggtgagacacgtggcccaaggcacggacagtaatggcaatacatgggcttctaaggaagacaagttcagtttggtcaagaggtggggtgcaggtccggggccagaactgagctgctaaggacaagagaggagaggctgcctctggtggcccggcttctccatttgccatgcacacagcctttgcctcttcttttatttgtcaaatatttagagaatattcgccaaagtgtgagctccccaggaggcccacaggtgctggagagaagagagggctttggagagtactgtaaggtgaaagaaacctaccaacaggtgcctaactgcctggccatgctaagcgcctgagccctgggacagggtatgatccmagcccttcacagtgcctgaccctgacgggcatgcacttggtaagtgttcattctggggacctggaacaagcgaagctcaagccctccttctgttcttggaaaactcctcctccccatggcagctgcatctcgaccaccaatcctactggaccacaggatgcaggaggactacactgtgtcctggatctcgtcattacaagagcaggaggtgagcactgagaaagatccagaagaactcatgcaagcagaggctgtggtctgtggggaggagggccgggcagggcagcggaccagaggaagaagcaacaaagaaggaaggggaagaggaggaggaggaggaggggggccgcagagtcactgtgggtggagggagagcaccgccagcacatgccccacagccatcaatatctcttcggaggacagattatctggggaatttatgctctctaataattaccttgcagagggttccacttatcttaccagaggaatctgccagttgccagacacacaggattctagtcaattccatccacactgccctccccctctgccctcctccccacctccctggctcctgacttctgacctctgaattctaacctttctttgcctctccagtctagggggargttgatggtggaagggtcacaacaacttttaacagatgtaaaggccaacaaaggggttggtgggttgtcccttatcagtagatatgagagttaacgtcccaaagttgaggccaggcctgaggaagtataggctcttgccaaagacagtgtgtgaagggccaagcaatgctttggggcagactgacwtgattatttttgtcttcacctgatgccatcagacctggttaggattaattttatcttctagtcttcacatccctcctcaaagccttcctatccccastccagccctccagtgaggcctccctccaataatggygtggctacttattcgaaaaccatcacgtgttgctttgggttgctgtggtttctttaaacgcacgttgcagtcctggctgtgagctcctggagaacatgggtactgcatccgtactgaatcaggactacctgagcaacagtaacaacatccagatggccctgacrgtgggcgggacagtgccctccctgcttagaaacaggaaccacatttcatctccacaacaaccctatgaaagagatgctactactacccctcattatacagctgaggacctgggagctcagacagcttcagtcacaggcccacggtcacttggtcagtggccaagtcaggatttgaaccaggtggtcttgtttcagagtctgggctcttaaccactccacaccacgctgcctcygtaggagaggtttgctgactgattcggacattttgtgttgtatctatccgcttatttaagtcatccttttctaaaataataattttttttgagacatggtctcgctctgtcactcaggctgtgcaggagctctgtcactcaggagtgcagtggcatggctcactgcagcctcgatcttcagagctcaagcaattcacctacttagctaccccagtagctaggactacaggcatgtgccaccattcccagctaatttttttttctttttttaagagagatcgtgtctcactttgttgcccaggctggtctcaaactcctggactcaagtgatccacctgcctcagcttcccaaagtgctgctgggattacaggcatgagcctgggtgcacctgggctggtgctcctcctccttaggactccactcactgctccctcctcagggggcctcccccaaactccttagctctggcactcattctttttccatcactctggcacgatgccaactatcaaaaattattttataggctaggtgtgggtggctcatgcctgtaatcccagcactttgggaggccaaggcaggcagattgcttgagcccaggagttcaagaccagcctgggcaacatagtgagacctcttccctacttaaaattaattaattggccaggcacaatggctcatgcctgtaatcctagcactttgggaggccgagatgggaggactgcttgagaccaggaactcgagaccagcctggtcaacaaagcgagaccccatctcttaaaaaataataataaataaaaaataattaattaatgtatatgtttatttactacctgcttttctcaatagatataaaagcttcctgggagaaagactggtctaatttgttcacccctctatcaccagtgcctaaagctggtccctagcatatagtaggcactatataaatatgagttggatgaatgaattgtctgatgtccccactgagcattccataatacatgatggctacttaattggacactttattttatgcaaactcatctatctgttctttatttattagactttacagtgtaccaggcaccttgctgagtaggttaggatttcactgtaccctgatatgaggtagagaatattgtctttatcattctcatgttacagatgaggaaactgagactcagaggttacacagcttgcccaagaccatacagaaatagggtaagacttaacccccattctgtcagtccccctgagtccatgatattaagcattctgcctcattgcctctggctgggtcccctcagtaacatgattctctttacccctgaacctctaaaatgtccccagccttacttctcccccctcaagagccccrtcrcctctttctctggcctctgtgtgctggctctcctccattggtccctccagattctctctctgccattcttttccctgctgggtgctgcggaagtctgtcctgtatggtcagccatttgccctcttccctctgctcctggtggtctgggtcaatggcaggtgccgagagagggaagagagacaggggatttcctctccccgccccttcctgctgtggagtgtctgcatctgcccactgaaggtcacagctcctgtgggccagccctcttcatacagctacctctgcaatctggtgaccttccccactcccccgacctagccctaggctgctgcactagccccccaccatgtgagtccctgcccgcagttttgaaactagacatgttactaaacactcctcagtttacttcgtgtggagctgctgctttgctggaaccctgcctctcggacatatgagtgctacatggcctctgcccctcccccaggtcccccaccactgccgctgccccytggtcactgcagctgcctcaccaggcccttctttgctgccagggtttgttctctgtctcyaagacctataaataaatgttgatttgctggcttgaaggtttgccctggcagccccaccagggagagcagtgccctggggagcccagcaagcccacagcaagctgtcctcccaagactaggagaaagcagagagcatcgggtccaatgcaggggtcccctatgctcggagcttccccctgtgcggggtgttaagggacccctcagatgatgtcctggtgcctcaaacaaagccgccatcacagcttcaaaatcacartatcatttgttgagcaactactatgtggcaggttctgggttgccatttgcatacattcactttcatgttaaaagacgagaaaaacargttcacagaggttaaggaatttaaccaaaacctcaaaactactaagtggatgaactggaattagatcccaggtcagcccaaatctataaggccttaattccccaccagtacatgctgcctcatgaccgatccctttgaatgacaggaggcccacagactcgaacctagtccaggcaggcagctcagagatgccagccacccatggctgggaggagatcaggtggagcaggatgacagttaggataaagggcacagagggctccatgctgcctagagtcactttgtccaaggaccatggcacagtttggccatagtgactgctgagcagccagggggctggaacatgccccccacccccgcccccaaccccgacccactgctccttcctgcagagccagccaggagccatcactcgtccttgggcacacaccagcatttcaagaaaacaagcctgcaagcacagacccctctgagtcaggcccaggactgtcacgaggagactctgaaggggaggggagggacagggtgacacaaagagggggaaggcctcctgccgctggacctggagccgactgtgcttccctaagtcctttctgcagccaaaaggcacattccctgagaacaccgctcaagatccaaaggctttcgctttttattttttaggaagcaatggcaaaaaaagaaaagaaaaaaagaaagaaaagaaaagaaaaagaaatccacatttctagtgttgggagcgattcttggaggcaaacacactctcttgcacacacacaccccacagcgcttcccccacacagcccaaaatagtccacaccatggactcctggagaacccggctcagcacagcctcccgaccttggtccacatgactgctggccagctctcagtccccagggtaacaaagtactccaaggacccgcagtagcagcgcctgctcctacagaccatttcacccctcccagcgaagtcccatctgctgtgtctcgatggagccaggtccagttagcagaggccacttccaatgacccagtgtggcccaaatctccagagctgacctgaacctctctccctcaacccctccaaatcttagattgctgctgctgcttctccaggggaatggctcccacaacattttatagactgcaaggaaaatatccagaactgagaccgttcttcaaaataataatttaaaaaaaaaaaacactgctgaaacacagaactgggtgttatcttaaaatctctgcacaaatagaatttgaatgctctcactccaatcaaaatcattctccgtccctccctttaaacactgaaagttcaattccccctaaagacaggattgcaaacatgattaggtccaattaatttatggagaaactcagaatgaaaggagagaaatcaatagaactgccttgttctgatcactaccgcaaatgaagtaataatttgaaggagatctggaaagaaaggaaaccaaaagtgtcacaccgcagccattggccatttaacaaggcagcattgccccatgtggactggctgggtggagaagaccactcaagcttacaagacactcctggggacagagggaggggagagacagctgaggtcacttgctttctcttcattgtacagcatgaggctcactggtggtaaattctcctctttctcacaaaagcaagacgtaaaagaaagtaaaaggcaaaaagcatccacacaagctgccagtctaataaggacactggtaatctccaggcaggccaaggccatatgggctccccctgcagcttcatgctaagtttatctccatcctcacactctacctccatctctcttccatatccaggaaggaaaaaaggaaattaacaagccggcatccaacatccatcctgaatcaccagctgggccatgtagagcatccaaagatggggtrgggaagccccaggggagagagagacattgacagatcaccgtccccacctctcacttgcctgcagctcccttgcatagatgatgctggcaaattcaacrtgattttcattggacctgcccagcagtccagatgtgggagcctaataacaaataacaatgccagctccatgtgatccttgcaccttcaagagaaaatgccttgctggccagctgggttctctggccaccctccagcccaccttgctgcttctggatggaggttcgtgaagctgctcctggcctatccaaatggccagtaaacattaacattcatccagtcaggcaacatccatggagtgcctattccatgccatgctgccccatgtgggaggcagcaaagcgcttcagtgaaaggctggggcactggcatgaggacaccaggtttgagtcccagctccttgcttacttgctgtctgagctgttgaactctgtgagcttcactaccctcagctgcaaaatgggtatgataataagacccttctcatggcttcactgacaagaacaaatgaggtgacctcactatgggtgatcagtaaatattagtggttrttaccacaatgtggggtcctaccctccactcattgccaccaccagtgccagaaaaagccagctcatgagttaactcccaggcagtattatccactccaggggcctctctgtccacacagatgagcagaagcagaatgcatgaaaaaataaaatagctcaatgccattgctacagattgccccaccaccaccatctcaccagtcagcttcaagccagcggggtcagcagtcagaagcacagccaagagtgtggggatgattccgtgacaaaccatccccagcagcagaaacctatctcacagcacacatcctcccagaagtgggtcaagggcatccattgcctttgtttaaaggcactgggtcacaaaggaggaggagccttagcaggttggaactttgggatattccacaggacaggtagaagggtgctgtgttggttttctattgctgctgagacaaattactacaaactttgtagtttatgaaaacacaaatgtacgattttacggttctagaggtcagaaatccaaaacgagtcctaaggctaaaaatccaggcatcagcagggctgtattccttttggaagctctaagggagcagtttcttccttgacttttccagtttccagcagctggtggcctcttcctcccatgtgtcacttctacctccacttccaaygtcatatctccagctctgactctgaccgtcctgtctccctcttgcaaggacccttgtgattacactggactcacccacataagccaggataatctcctcayctcaaagtccttaacttaatcacacctgcaaaatccctcataccatgtaaggtaacatattcataggttccaaggattaggacrtggacatctttgggggtaaggtcacgcttctatctaccaaaggcgtgttctgctgctgctgcaaggtacacttgaataccgtcaaagcaatggtgaagaattgaaagaaacgcagttatgtcctaagcccaggaatattgaagctgtcctctttttgacaaaaaaaaaaaaaaaaaaatatatatatatatatatatataaggcagatggtgcctaagagcataggatttggaaccacatcgctctgggttcaaatctaagcttcaccaccagtcccagctgaagctattcaagaccagaagctcatctgtgtgaacttccattttcccaacattgtagggttgatgtatcctaaggaataaagaacaaaatgcacgcagaatctttcacaccatgtctggcacacagtgaatgcttagtaaatggcaactaagaaattgctcggtactgttattctattagtttggttctatcagacccagtcactaaataaaccagtttgacgtgaagtacttggctatcagcaaatactaccaggccctgtcaagtcccaggaatcagaggggctgtttggccaatgcagactgaccctttcatgctgacgtcagggagccccagcagagacaaccaaagatctagagacatgatcaaaatttccctgtcaggacatggtccagaaccatggatctcagtttactttccgcagaaagaagaagaaaaggtgaagcccgcacacttctctcttccacaaactcaggccccattcccttgtacgtctttctcttataaacaattgcactttattttcaattgtgttgtgataaatttgagctatagcttacagtcaacaatttctatcacaaatctttctgccttccaattctgtgtatgtacaaactgaggctaggaccaaaggaacraagactttatcttacatgaatcatttgattccattactgaaatctctcaggtgaagttaaaatatatatacactgggtctatattagaatatatgagacttgaatttgatctgctaattagctgggtgactttaagaaagtatgtaacttatctgagcatccctttccccatctataaaaggaggcagaggccaggtgcagtggctcatgcctgtaattccagaaggcggaggcaggcagatcacttgagctcaggagtttgagaccagcctggacaacatggcagaaccccatctctaccaaaaatacaaaaaattagccaggcatagtggcatgggcctgtggtcccagctactcaggaggctgaggtggragaatcacttgagcccgggaggcggaggttacaataagccaagatcatgccactgcactccagcctgggttacagagtgagatttatttatcactaaataaataaataaataaatggagacaggaaaatctgcctcttaagactacagcatgggttaaatagcatgtaaaacctttggcatgttggatttctagagcatgtactatgtctcagacactacaataaacattgtatgtgcattaattcattgaatcctaataacaactctatgaggtgctgtttattattcctattttcctagaaagtagacctcttggggccagggatagtttttttcatcttcaactcccaactcawataccctgtgagtggtaaatgcaagctacaactatcattgtcgatagttgagtctggaatcaccgcagacgattttataaagatggaccccaagaggtagggaggtttagagaaaaggaggaaggagagtgtgcaggtcttcccaatggggtaaggyraggcatgaggaagtgacaagaaatgccaagccagtaagaagacaggacgaagcatcgcacctggatagaagactaagtaaaactaccttcctgtggctaaggggtctactaggatacactcattgacttgctttggccaacagaatacagtggaagttagattacaccagttccaagctcaggcctcaagaggccttgcaagcttcccttctgctctccgggaaccctgcctagttgcttagcatatgaatacgcttgggctagcctgctggagaatgagcagacacagaacacaaacaagctatcctagatgaagctattcatctaggacaagctgactgcagacacataggttaaccagcccaaatcagaagaaccagctagctgagcccaaatcgaattgccgacccacggaatagtaagcaaaataaatggttgctatttgaagccattaagctttatggtgttttggtatgctgcaaaactaacagaggcaggagtcaatgtctcattcatctttatatcttcaacagccaataaaagtcctggcatgtaatagttacacagtaaacgcttcatgaataaagtattgaactgatatatcaatacagctgtgaataaataaatgtcatatgctggaaaactgaaatcatgtaagatcgcataattctattgagatacttcagcttaaagaatatttttaaatggggttggctgctacctaattttaaaatccattttcttttttcttcctagccaacatccttttccacaaagtttagtcaaatagaaaagaaagtttcacatgaacatacaacgtaggatgyggtgatcraaaactagactggttgcttagagatccgagttctagactcaactctcccaataactgggagaccttgctaattctcttaattaccatttctacgtctataaaatagatattaaaaaattacccttccctgtcaacctcacagggttgttgtagcaaataagacagcatgggaaggctctgagcactttttaccgtcaatgattctacttccagccaggctcagtggctcttgcctgtaatcccagcactttgggagtctgaggtgggtggatcacctgaggtcgggagttcaagaccagcctggctaaaacggtgaaaccctgtctccaccaaaaatacaaaagtagttgggtgtggtggcaggcgcctgtaatcccagctactcaggaggctgaggcaggagaattgattgaacccgggaggtggaggttgcagtgagccaggatcgcaccacggcactctagccagggaagacagagctagccttcatctcaaaaaaaaaaaaaaaaaaaaaaaaaaaaagattctacttcctctataagcagaactttactttttgatggtttctagtgtttttataatatatcctcttaagagccccatttatccttttgctgtcttccttttaatattctgtatcccagtagccatattttcaacatacatacatayatacatgtatgaaaccaagataggaaatggttaaaattatccttgatagtggagaaaactattgctcmatccaaagagagctggtatttctggcactgaggattacatgtgaccaaggtcagacatgatacctgcaagatgtatcctctagctccagagttcccatggagaactcggggtccctagttggctgcagcaggggctgccagctgctaaggatgcagccagatccctttccctttccagagacttctgcccagtatgggaagtcagaagctccacactccaagtatggctcttccacaacctcagttcctgccttgggccaagtcttgagatcagtgtagctgagctccgagcccaggtctggcactgctaaatggaaatccttcatcttggcaactccttccayaatggyagaaccaggttggaagttcacaaggtgctccaggcatatcagggcttactgccctctcctaaagctcccgaaacctttggaagtcacagttctggagtaaacatcaggtgtcctcatacccaagcatctcaggagtgtgcaggaggcagcagaaggtagcctgtgtcctgaggcagtgcattctccccatcccatgaatgatggggctggacagaagacatcagggacagcaactcaaaccactgggcaggtggggctgaatggatgggcaacactggccgtgctcagggctctgggtcttccttgacagtgcaattgtaatacctccatccttccatcaacccatcctccctatggtggacataggttgtctgcctgcccagataccattctacctccttctagtaacaatacctccattttctacctctccctcactatcagttgtgtaaaatcaaccccactctaccctccaacttcagagacaggcttgtgactaggcctggccaataagaaaaccggccatgttctagccagccatggtgactcacacctataatcctagcactttgggaggctgaggaaggaggattatttgaggccaggagttcaagaccagcctgggtaacatagtgagaccttgtctctacaaaaattggccaggcatggtgatgcacacctgtagtcccagctactctagaggctgaggtaagaggatcgcttgagcccagtgagccacgattgcaccacagcactccaacctgggcaacagagcaagatcatatatgtatatatatatatatgagaaagagacccacatcccttagtgatccgttcaagagtgatcagttcaagggtgaaaatgtggtctgaggcaggcaaattagagtcaatcctggaacttctgggggaaagaggcactttctttctcttagtatggaaaggcagataacaatatatacctgaagcagctgggagccmcccatcaagcaggcctgtttacaaaggatgccaatgtaaagaaaagtggagtttagagatgaaggagagatggagggagtcaagaggaccttgctgagcccctagaccgagtcacgagtgaagaagatacactcacgagctgttagttacatgagcccacacattcctctgtgtgcttaagcactatgagttgagtttcttgccatttgcaaccttaaaaagccctgcctgatgcacatcccaccatttgatgttaccaacagactctaataaggctgaggaagaacccaggggccccatccaaatacctctaggctgcttgaactcaaatgcttttgaaataaggatggttcactgtggctgtcagatgccacacatcaawcctgaaaggaaattctagccagggaatgctacagatggcagctcaccacggcccccaccactccttattgtctttgtcaagcccatttcctcatttactttacctgcctggtccctttaaatacataagtttaccatcccttattagatggataaatagataaatggatrgatggatggatggatggatggatggatggatggatggacggacacatggatggatgcatggatgcatggatggatggatggacacatggatgcatggatgcttggatggatggatggatgcatggatggatggatggttgcatggatggatggatgcacagatggatgtatggatgcatggatgcatgcatgcatggatggatggatgtgtgcatgaatgaatgcatgcatgcacagatggatgcatggatgcacagatggatgcatggatggatgcatggatgaacggatgcatggatggatgcatgaatggacggatgcatggaggaatggatggatggatagatgcatgggtggatgcatggatgggtgcatgggtggatgcatgagtggatgcatgggtggatgcagggatggatgcatagatggataggcagacaagcaagcagttatgtagttgcaagttgaacctacacacaaataggcatgatacaactaaagaattaaaayggcagcccactgcagtcagggggccatctgacaatataggaaaggagataactataggcttacttctgtatggttttgggtgtctggaataacgrgagatgactctctgggtagcactcaccctgtagttgtgctcctccctctcaagccacagtggttaacaccaccttaccaatagtgcagtacaaagagaagccagtcctggcattcacaggtagctgtgaaaagctggccctaaaaggcagtctcgctcaatccccagcatctactyggatctgggcaggcagccacagaaacagaagaagctacagaggatgsaggcactgggttttggtgtctggacatggaagaattgcaggccaatatccacaaatgtatccgtgaggctctggtcttgaaacaaggatgtgaggaccccaggatggctggtgagggacactaagtggctcaaagaactgagaaaaaaataaaaacatagcagcaatagagaccagagtccgagccaggacaaggcctgtccctcagccacctggctgaaggcatcatcatgacctcaaggaggtaactggtgagtcatacagaaccacactgtgcactcttcaccatggtttatatgctcacagttcaggcaaytgcttagaaaactgcatatcgttcatgcccctatgaatcactttcctccttttgttgtctttgtgaagtcatcacaaagttctgagtggaagaattcttccagggactgccaaggagtgacactgtagccaggtgggttcagctctcactttgctcaggatatgggtgtccagtggcgacagatcaggaaaatagccccatactaaatggtgcctggacaaggcccatamacacttggatatgctgtcctgaacacaaggcacaagacacaacacgggaggacctttcatctcatgtctcttacagccagggactgaaggtgtaggacagtaggagaaaatagagtttcacataaaacaccccaaggacatcaaagaaggctagctgccaagaggtaggaagaactagattcttagggacttatccttggggattgataccacccctgccaggcatccacctttggggtgactcagagccaagaaaacaaaggcatgggataagccatggaaaacaaattcctgctgagtagcaaagagagtggcaccaacaagtggcaccatgtgagtgacaagagcaagcaaatgctcacacagggacagctgggtgtgcagggccatcacagctccccctacccccaccacctgaacactacgagacaaatgggactcctggtttctgccctcaacatgcttatatttgagagaggccacaggaccagcgagtgcagagtcatggcgaactgtacacaacctggagtcaggagacccatgttctcaccctgttctgttgcctcgggggccctgaagcccatcgctaagtgtttkgggctccagtttgctcatctgtcaagagagaacccttcacacagctcctaagtgctgtgagtccctgtctctcagactggctaatctccaagggcctgccaggtcccacatgcatgctcttgagagtcacatagatatcaaagctcaaaattagctcctgggagtgggagcaaagcttctgagcccccagcccctcctgtgagcacatacctcaaggcacatgcccccaacagcccagaactgacacatttttgatagttcctgagtacatggatttccagccctggaaatgtttgttttaacttaccaggagaaaagaatttggattcttttttaaatatacacaaagggaatacatttgtatattttcagatacaaagtggatgggaagcaaggctaaagactgttcttttcccttagctcatgtgagtgctattcctcacggtgaattctccaaagaccatgaatggcagagatctttgatctcccttctagcctgtctcgatgtgatagcctggacatgggcagctatcacgccacccttcagaacctcagcacttcaatgaccacatcctgccatcatcacccccatggaggtccagggcccctgccccactgcctacctctccacctgtgcccacctctccacctacccgccccttgtcacattgacagataaaatacaggactcccagttaaatgcaagtgtcagatggagaacaaataatattttagtataacatgtgccttcctaggcagcacaactgaagcaggccccttccaaggatagaaaagtcctcctctcttcctaagtttgtgtccatagaatctcatccagtggcctttctgtcccctggcttcaaatgaaacctgccactgcctctctctcagggtgaagtgtgaagaccgtggcttccaaggccaataggcatggaggtagtcatcccattcagacgccaatggttcttagtcaaaaaagctgcttatggctggagtcaaaaacatgtctaagcgtgactatcagccccagtgcagaagagtctggggagagggagaaacaagaaacagatattaccacaaaacactccaagggaaatctcactacaaaaaaagaggttgttgcctggtgatggctggcaatgggccatgaaaacctagttctgatttttagatacaagasacaagcccaacgtgtcacccagcctggatcccatagaggtcacatggacaaaacagtacttgaagatctttgacctgcctaggtgggcaactggagtggaagctccacaagggtatgaatgctgtcttttgttttcctcatctctatggactagtccatctagtccaggactagcctcagagtgagcatccgatgatcgtaggaagactgaatgaatgcgtgaacacatgaatgaatgcctacattctccaatatgtcccagaaagtgtcaagagctttgtaacgcaaaaggctctgaacaactcaaataagaaacacaaacatgtgcagtgaaagggctaggcctggatggcctgtgaggtcattggcaatgtggtgagcccttgagcctgtcatacacaggcaaataacttcactgaaagaattttaaacgctacctccaacaccctagctcagcatctatggttgaagccaccatgcccagtcatggtgataaccccagaagggaagggtgcagagacgccaagaaacaagaacttggagaggacaatgaggaccaaatgactggggaaataagggatgagtgggtaggaatccaaagaacagaataggaaaaataactcaagatccagcactgctttccaggacacacacacacacacacacacacacacacacacacacacacacgcagacaaagattccccccttccagatccacactgcgtgcctcctgccagccccatcccatcatcctgtgacagtgcttctttgtggaatagaacaataggtacattatgccaacctataattatcctaggagaagcgatggcgaagtcaaggcattatgtgaacactggaatactggataccaccccaccaggagcaaacaacaacaaaaacaacaacaatccacaaaatctctaacgcagataaagactgaaagctgcctaagccagtgccctttcacattcatatgagggtgggattttttccttttcacatgattatttaagcacaaggccttctttcatggaattgatagagtattgggggaaggggctgagaggttgggtttgtttgtgtttttgttttttttcccaataaggaggcagaaagtagaggaggtcgtgagcacgagaaagtgccactgctagggtatgacacatagagccctcaaaggtagttgaatctgattcwactgagtgaaatcatttcattaatagagattccttctcactactcctgtgaaactactttccagggacgttggtataaaataggctgagtcctgggaggtgtcatggaagacagagacaagaaatcagaatatctgaattcttatatcacagccactaactagctgtttccttgatttattcaagaggtatgtgttccctatctgccacatgctaggcatcaagctagcaacagaaggaaaaaacaaagcagtagtcactttcctctcggagcttcagcttcctactgtgtaaaacgagggagtcccacagccctggacacacncacacacacamacacacasacacacacacacttctaaatacaaggtgcagccccagcctcccacaggacctgcctatacaggccatgactgaagaagggggaaacctgcagcttctaaaactgcacagaaggctgggcacagtggctyacacctgtaatcccagcactttgggagggcgaggtgggcagatcacctgaggtcgggagtttgagaccagcctgaccaacatggagaaaccctgtctctactaaaaatacaaaattagccgggcatggtggcaggtaactgtaatcccagctactcaggaggctgaggtaggagaatcacttgaacccaggargcagaggttgcggtgatctgagatcacgccattgcactccagcctgggcaacaagagtgaaactctayctccaaaaaaaaaaaaactgcatggaagcccaaacccccagggcaaatggaacagtcacagcatgccatgcacgcacagggtcagagcaagagtatggccaggcgcggtggctcacacctgtaattccagcactttgggaggccgaggtgggcagatcacttcaggtcaggagttcaagaccagcctggccaacaaggtgaaatcccgtctctactaaaaatacaaaaattagttggacattgtaatgggcgcctgtaatctcagctacttgggaggcctgggtattagaatcgcttgaacctgggaggcggaggttgcagtgagttgagattgtgccactgcactctncntgggtgacagagcaagactctgtctcaaaaataaataaataaaataacaaaggtgtgaaaagtaggatgggtgtttcctagcacatctctagtttctgagggctctctctaatggggaccytcctcttgaattgtggtcccatgggttccayctcttctgggatccagtcagggcttcttccttcattctcaggcaccttcagmcttgaaactccttggcctcctttcccttcaccttcctggtgaaacataacagagggtcttcgagacaattcctttaaatcatcaaagggcctatctagcaatgtctaactccattccttaacgtttactgaaaagctcctcaaatacatgatcctcccctctacccgttcccctcagctcttagycatccttcctcagatgstactttttcatagggactaatttcttccttcttgccaaatccagtggccacccgtgggtggtcctgctgctcaaccaacgtatgacagtattagccatgcgctccttgaaacactcagagccttgattctactcattcatttagttcctccccaaaagttccctgagcccctgctaggcagtggggatttggcaataagacccagtccttagtcctctgctcatctctccacactccgctcttatggctccaactctcacatcagcaaagggctttcaaagactcaaagcacctccacactcattacctcttgtaataacaaaattcaactctgcaaactttgcaaaacactttatatcgtaatccttttttccccacccscactgggcgaaagaacctattcttgcaaccaacactatcctgaaaatgtggaaaacctctaatggaagtgcaaccaagtgctcctggaattcgacatgcttttttatgtccttcccacccctagttctcccctccctgcccactctcccttcgcacttcgcttgcctaccttacagcagagttcattttgtcggtctcttctaagtggtgggctcctggagggcttccaayggactgatctctttgtagactccatattactcggtgcttaaatatttgttgaaatgcagcaagatcagggagtaattcagcaccaattgtttacctgatcctggaaacctcatctctgccccctccattccccaggagagtctgcccatttgaaaactgttcctgggtttatttctrgcatggccctggagagggctgccctaccccgcagggtcagggaggtgagttttctctcaccttgggtactgcagagcccaccaccagtccaccctgaaacctcaaagcaggcccacagggtagatatctagggaccttgaagcaaacatttcacctattcaggacacaaactaaataagcttgtgtcgcttagtaattctgtaatgtcttacttatgcccttgggcaaactccttaaaatayttgtttctgttttcccatcaataaaatgagaattgaagcacctatttcttaggattattgtgaagatttgatgaattaacactaggaaatgtgcctagcactgtttaatatgtggcagaggctcaataaatacattattattattattactattattgacaggttaaaggcctgtgatgatactgactccagcataactctgatactgcccctttgactcggctagttttgacagagggccctttgacaacacctaaaaaacaaaccactaaactttcagtttttaaaaaaataccaggtaagctgggtacagttggctcacgcctgtaatcccagaacttggggaggccaaggctagaggatgataggaggatctcttgaggccagtttttaacaaccaactctccagygaactaatccattcctgccagaacaaatccagtcttacaagagtatgaatattagagctacaaggtaccgccaagagacagggttttgctttgttgaccaagaccagcctggtcaacataggaagaccccatctctacaacaaatttaaaaattagccaggcttggtggcacatacatagtcctagctactcaggaggctgaggcaggaagatcacttgagccctggagttggaggctgcagtgagttatgatcacgccactgcattccagcctgggcgacagagcaagaacctgtctctaaaacaacaacaacaacaacaacaagtaatgtgagaaacaaatgccctccctccctccctgagggtcacccccagcctgacctgatggatgggaaaagataagctcagagatggggtaaggataaggtgggagttaggaatggggtagaggtcagggatggactgagaactaggaaagggaaggatcaaagatggactggaggtctggaagcaggaagagagaaatggagtaagggtcagggctggagaccagcagaaccgaggtgaaatktaggaccatctgatggatggtcacattaataactttaatttttcaccaccagctcccactacagcatccaaacatcctgctctgaaggagtgggagcagggacagggaagaagaagaaaccttaactgagtgaacattttaaaacaagcaggacatttcgaactcaaatagtaagagtcactttgctgtccaaatcccaccagtccttggtgtaatactacaagtgggacttacaagcaggacccgcaagaaggttctagtaactacctcagcttgcaggacgtaaaatgcctggcgaactttgcattccaaggacaggagtcttccaaattaaaattttaatagtgtgtgaaaatagttcgccatttactcttaggatgaggtagtgtttagaaagtcagcctggaaatccaggccaacattttcagggatgcctcctrttctgggaggagaaaaaccagcttgttgcttccctccagtagcacaaagcagcagggaacyggaaagagagaggggtctgaacagcttcttctaccaggaaaccagccaaaggtctccgggcatgtaaggacatctgttttcagaagctatggtttggattttggcattcttaggagtctaggagcaatcctactaatttgggttctagctccaaccatactacctacctgctgtgcgaacccaggcaagtgattttacctctctgagcctctgtttgctcatctggccctctagacaagattaacttggcagtgccttgtagctctaatattcatactctcataagactggatttgttctcacaggaatgaattagttccctggagagttggttgttaaaacaccagggcccccttgggtttccccatcttcacacgtgtctactttccctttgaccttccctgccatgttgtgatgcagaaggaaagccctcgccagaggacagggccatgcccttgaacttctcagcctgcagaaccataagctaaataaatctcttttctttataaatgatccagttcctggtattccattacagcaacacagacagacactcccacatcatcrtcacacagggcttgggctgcctggccctggccactgcctgccaacaccaggcctggtccctccatcatctaggaccttggggaacatggcaccggtgaagggcatgggggttaycagaaagagtgagaagtcggcaggtcagcacggccacacaagccaccctctcccaacttatgtgcaggcatgatggctccccatccaccagcactcctgaggccactacaccagggaggaaagwagtgcatggggaggcctggtcacacctgcccttcctttcagaaccctgcatgtggctgatggcaggtcctcggcgcctggtggaagagaaagggaaggtggcactgggctccacaggcagtgattctcagccctgcttgtcactgggagctggttcctgggtcccaccccaatctcttatgattccatagatcaggaggagacccaagaacccaacttttcacttagctctccagggaataccaatgcaaacggccactgaccaccccttgagcgccctgtggatgagagggtggaactagaggttctagaagcaagtgcttgagtcccctcactagctgaatgactctgggcagtttacatctcctttcaaaccctcaactgcccatctgagaaatggggatataaaagygtctgcttcttggggttatttagagaaatacatgagaaaaaggatggaaagcacttagcactgtgcctgtacatgttgagaatctataagagaagatcccctcttactattcaggggtgacttgtacaaatgccttcttccatagcaatcccttactaaactggagcatttcatagggaagatgcgaataagggcaatgaagcctcagatacagagggcagcggagtgctgagacacctccgtgccctcccacaacatcccagtgctgtggtccagcaacatacccgccccatccctccaactcagaacatgctcrttgatgtgcctgaacccaggctaaatgggagcacacctatagtgggggttcccctgtcagagatatgcactgcaagggcctgcggtccaggacacagaggaaggaagagacgggmggagaaygtgaatcacattcatgccagggtgtgttctaatacgtcagcaaatgtgtaccgascttccgggctgcagaggaaggtgggcgtgtgtggggttagtgacttgaagggaaagaggggcatgaaaaagaagggggtgaagagttagaactggtgcagcagctgggtctcacacacaaatggcatgactctacttcacaggaactactcagaaagggaaaagaataactctaagaaacaaagatctgcctccaaatccaagaatggcagtagaaaatagggtcccccacccagcaagcacccacatcacgtttcatcagaagaactctctattctcagccaggcctggcacactgccttgaccttcccgatcctggagctgggccctgggctcagaagaccccagactgtcattgctggaaacagaatcattgcagatatagttagtcaagatgaagtcacactggaatagagtgagccctaatcttacaggactagtgagttagtccatttgtattactataaaggaatgcctaagacttggtaatttgtaaagaaaagaggtatatttcacagttctgcaggctgtagagcaaccacggtgccggcatctgcttctggtgaggcttcaggaagctacaatcatggcggaaggtgaaaaggagagcaggcgtgtcacatggtgagagcaagaccaaggcagcaagggtgggaagtcccagactttcaaacaaccagatcttgtgtgaactaactgggtgagacttcactcatcaccaagtggacggtgctaagccattcgtgagagatccaccctcatggtctaataatctcccaccaggcctcacctccaacattgggaatcacatttcagcatgagctttgcaggggacaaacattcaaatcatatcaattagtgtccttataaaaaagggaagtttgccccatgaaggaagagattggggtgatgtgcctacaaagcaaggaatgccaaagataagactgccagccaagccccagaagccagcagagaggcctggaacagattcttcctcacagccctcagaaggaaccaaccttgccaacaccttgatcttggacttttagcctccagactatgataaaataaatttctgtgaagttacccagtctgtggcacttacagccaccctaacaaactaatacacccagaaccttactatccttcaccacaccgatcaccaatgaggcaagtcagaaatttccaaaaagtctccacatttatttttctacccaataaaccagacatgatagaggaattcaaatataaacaagacataggccctgccttccagagctcctaggcacacaaatgttagtcactttacactttgcaaaacactttcacatatattgtctcttgtagatccccccatctcacattgagatgggaagggcaasctgtaggttactcccattctgcagatgagaacactgagttttggagagttggtggcttgctccagggcacccagccctggagcggcagagagggagctgcagtaaagtcttgagtccaagacaacattggtgtggctgttttctttcagcctgtcttgctgcctctcctgccgtcttggaacctcttgcctccttcaaacagaagcccctgcactgaggtctcttgtatctaagatctgccccaagtgagctccaggaggcaaggagggaggccagccatgttaaagaccaagttaaagaccaaagtggctgcagcaccatgagataccagtgtagtcccccaccttctctcatagtcccttaccctgaggctgctcccaccagccccgcttacctttttcccatccccaccccmggcccccagcctctcccatcccacaggcagggcaggttcctggtaacagcattgcccagtgttgtcaaaatagcgaggagctggaaagaattccagaatgaaatctatgtgcctctgcagcctcccaactgactgccactgtggcagctaaacccgctaatgtgctaagcgttttctggcagggccaggaggcagggttggtattttgggagctgggaggggcttggaggcaacatcctcggcaagtctgggaaggaggtggaggcagggaggcaaagggaaccgacccagaacacttcccatgacgtcaccgagagccacctgagctgcacctcaggattcctgaaacactgctggcggagcggagagtacggagagtacgctgggcccggtgggcagggctcagcagggcatggaggctttgtagctaggcctggggggagagggcgctctagtatgccacttgtcaygtacactttttctgctgacacagagcagtgtgcaatgcgtccgggaggctgggcagcccagggctggcccaagctctgtttgcctgagttggcagtggcagggcccatggtgaccaaacaaaagacgggaagccaaacgcccagaggctggcgggtgaggctccctgagagggctctgaggatacaggcactggcgaagaagggccaggggctcatagggataggaatgggkttgggggcaatgggaacttgcaggcagggtcccctctggtttcccagacacaccgcatcgcctctgggcatcagcctctccacactgtccttgcttttcgggggctccttcgaaaatgcttcaaaccatgacaccaggaaggggagcaaaccaccaaatctgagatccaaacaaggtcccagcattcctttgtccctgatgggctyggctccaaattctgggagaaaccagagggttttgagagagtcaggagaggggttcaggggacaaaaaatagggctggtgaagaattccttccgggagccgtctggtagcagggagtaccgtgggtggcaaggccgtgctgctcaggtgaggggacatggtgtcattctgggaacagatgagccagtaaaaccctgacaggattcaatctggaggaaaaaaatcccagctgataggaactgctgagcgcttgcagcttttaaagcccctctagcaaaaggatctgcaaaagytttgcaaactctgaccacgcagccagtcagccacttcccagcccacagcaacgagagagtttttgctacatcagaacaaacccactcacaaatatctcatcctggcctcccccccggcacccattccttttgggtctgtgtgcctgccttcctcagaaatgacattttgtcagagcagtgagagatagtgttgcaggggccaaaggcagccagggggctggactgcaamtaggctcccctgctcactagcggctgaccccaggcagggyacttaacctttatgaatctcattttttaatctgcaaaaatgcaaataatgaagctgctcttacagagttggtgagaggactaaatgagatgatggatgctggggctcgagcacagaratgaggggctccatgacggctggtccccctccttcccaccttcctctccagggccctccggcaccataatcagtgtgggaaggatgcagaacaatgggagtttaattcagaggttggcgaggcaaaggcatactttaatagaattctctctcgcccagtacatggtttcttgtccaccccacccacctttccccatctctaccggctgatagtctctcagctagtagaccttttcttgtttagcagggccactttttttaaaaactccagacgggtaccctccatgttgcaggcgacgtggccctggatcactcaactgactgtcatttgaatggtgcccccagagtgaggcaatggtgcagccctcctaaggcccttcctgagtgtccctccttcatgaagatgattctgaggcttcccaggccttcacccttctttgaaagcccatagcagttcatatgcacttctcttctatgctcaccaaactctgccttcatcatacttgggggatgtgtgtgagagcgagagagagagtccagcagggattagatctgacttttatattctctacagtgcctggcacaatgctaacacatttgatgaggccagaattaccctgataccaaaaccagttaaagacattaccaaaaagaactttttcaatattttaattcttacctcataccctagataaaaattaacttgagcsgggtgtggttgctgacacctgtaatcccagcactttgggaggctgaagcagacggatctcttgagaccaggagtttgagaccagcctggccaacaaggtgaaaccccgtctctactaaaaatataaaaattagytggtcatgatggcaggtgcctgtaagcccagctacttgggaggctgaggagaaytgcttaaccgggaaggcagatgttgcagtgagccgagatcrcgccactgcactccagcctaggcgacagagcgagactccgtctccaaaaaaaaaaaaaaattaactcgacatggatcgtagagctaaatggaagactaaaactttcaaacttcagaaagaaaacttggaagaaactttttctaaccttgggttaagcaaaaattttcttaaataggacataaaatgcatgagtcgtaaaggaaaaaaattgatacattggacttcaccaacattttaaatgtctactctttgaaaggcactaatatgaaaatgaaaacacaagctacagactgagagaaaatatttgcaaaacatatatctgataaaggatgtttagtcagaatatataaagaactcctaaaactcaataagaagacaaatgactccatttcttttaaggtcaaagaactgaacagacatttcacaaaagaaaagatacagatggccaaaaagcacatcaaaaaaaaaaggttcaacattattagttagcagggaaatgcaattaaaatcacaatgagataccgttaaacatctattataatggctaaaatttaaaaggctgacaatgccaagctctggcaaggatatagaataactacgactcttacacactgcgtgtgggaatgctaactggtacagccactttggaaagcagtttggcaatttcttttaaagttaaatatacaattatattttcatttctcccagagatttgctcaaaagaaataaaaacatatgtctacacaaagacctataaataggaatattcatagcagctttctgcataatggccaaaacttgggaacacccaagtgctcatcagttggtaaatgaataagcaagttgccatgcagccacacagtggaacgcacccatacatgcagtaacatggataagtcttaaacgcatggtatcagttcctattgctactctaacaaattactasaaactcagtagcttaaaacaacacagatttactgtcttacagttctggaggtcagaacgtccgaaatcagtctcactgggccagcatcaaggtcagtttccttatctttttcagctcctagaagccacctgcattccttgacccatggccccttcctccaaagccagttgtgttgcatcttctatctaactgcttaagggaacaggactttatcaaggcacagagccacagcaagtatgggaaacatataagtagttccatatttccagggtgtgtaatgtaacatttcraagataaggaaactgagattcagagagatccaatatcttacccaaggtccaggacacagtgaaaatcatgttcaaccctaaggcctctgaatccaaatccagagtccacgtgagccctcagacttccctgccttgaccgtggatagtcatctccaccttgtctcagagccctgcactcccaccctwgtacactgcrccagcagctaagcctgtggagccaggcagaaccctgggcctccccacctccccaccctgggaccaacagattcccagctccagcaggataacatcataaccttaataagattgacatttgcatcctgttttatattcatcagcattcttacacttacgttatgttatctggccttctccatcgtatgagtctaatggtgcagatattctccaccccacattctccaaccctcagaaagctgaggtactttcttatacagcaagtgggtagaagccaagatcagaaccttacccccaacccaccccttgataccagaagagcctattgactcagaacaaaactcaggcaaaccccccacctagctgagcttcccctccttcatctgcaggatggaaaacagggtaatacctgccctgcctatcctgatacatcaggcataaatggaaaaaaaaaaaaggaagtagtatgtaaaagcactttggaaatgttaaaatgctatgcaaattataaggaactgttctgattatactctcaagaaatgtcacaaattttctccaaaagtgaataattgtcattacttttcaacttcatccccttgaaaagccagtttctcctcctgtcatcttttatttctggttaaagcagagatgttatactcaacattccaactggaatatcaagatcaatctttaattcctccttccagcttcaccctttctgaaatcaagaacaggcaattctctactccacccaccatctcatcctcagtttctcttgccatctgcccccctctgaagctagaaatcaccagcaaccattttcattcctcatccctcyggtctctcctcagtcagagccaacctacatgatgcaaaagcaccactccaatcacctctctcagaggctcacagccccggggggacagcrtccaggggtcctccacgggctgccccagtgaagctctccagcttgtctcccatgactcaccaacccaggtaagcctaaatggccctgtttcccaaaactcaactctcttcccacttttatgtccccactatatctggaactccctttcccactatttaattagctatgggggtaggaagaatcaaactagacccccagctcttacatcaacctaaatatattccaagtgaatcaaagaattgtggttaatggctgggcacggtggctcacacctgtaatcccagcactttaagaggccaaggygggtggatcacctgaggtcagaggttcgagaccagcctggctgggtaacatggcaaaaccccgtctcaactaaaaaataataataataatacaaaaattagccaggcatggtggcgcaagccggtagtcccagctacttaggaggccaaggcaggagaattgcttgaacccacccagcagatggatgtttcagtgagccaagattgcaccattgcactccagcctgggcaacagagcaagacaccacctcacaacaaaaaccacacacacacaaagaattgaggttaaaaaaaatccagattatatagatgaatatctatctgatagctgaatggggctggaatttctaggctacatagcaatggagtaaatcagaggagaataaaatgaataatagttaacatttacctattttcacttcttttaactggatatccatattttaaaagtaaacataccctttacttcatgttgtacacaaaaaataacaaaatggatcacagaatgaaagaaatgctaaaattagaaaaattccagaagaaggccaagcacggtggcctgtaatcccagcactttgggaggccaaggtgggcagatcacytgaggtcacgggtttgaaaccagcctggccaacayggtgaaacccctattaaaaatacaaaaattagctgggcatggtggtacacacatgtaatcccagctattcaaatggctgaggcacaagaatcccttgaacccaggagtcagaagttgcagtgagcagtgatcgagccactgcactccagcttgggcaacagagcgagactctgcctcaaaaaaaaaaacaaacttccagaagaaaacatggggaaaatcttcataaccttggtgtaggcaaagattcttaggacacagaaaataagaatcacaaaagggaaaaataacctggacttcaaaattaaaaatttctgctcttcaaaagacattgttatgctgggtgtggtggctcatacctgtaatcccagcacactgggagaccaagacgggaggatcatttgagaccaggaattccagaccagcctgggaaacacagaaagaccctawctctacaaagaagtttattaaccaggtgtggtggctcatgcctgccgtcccagctacatcgcaggctgaggcgagaggactgcttgagcccacgagttcgaggttacagtaagctttgatcatgccattgcactccagtgtgggcaacaaagaccttgtctctaaaaagataaaaatttaaaaattaaaaagacattgtttaagataggagatatggttgtacaacaatgggagtataattcacaccactaaatactcaacatgattccaatggcatcttttatgttacgtatattttactacaatttttttaaaagatgttgttaagaggatgaatagacaagccacagattgggagaaatgattcatagtacatatatgtacatagtatagtcatacagtatatagatacatgtatacacagtacatatatagcacatacatgtacatacatacatatatgacaaaggatctatatccagaatatataaagaactctagcaatttagtaataaggcaaacaacacaacaaaagatttgaacagaccctgcacaaaagaagatagccaataagcacgtgaaaatatgctcagcatcatcagtcattagggaaatgcccactaaaactacagyaagctacygttcacacccattaaaatggctaaaattcaaaagactggtaatgtcacctgctggtgagaatatatrgcaaccaaaagcacagccactgctgacgggaatatgcaatggtgcaaccactttagaaaatagtatggtagctgcttattctaaaaacatgcatttaccatatgattgagaagtttcactactaagtatttatccaaaagaaatgggggaaaatggtatgtcaaaaaagagacatacacagatgctcgtggcaactttattcataatagccaaaaactggaaacaacccaaatgtccatcaactggtgaatgattacaatattttggaaaattcatatgatgaaaaactcagcaaaaaaaaagatgttactgcattggtatcaggactgaaaaaaataaaaataaaaattagctgctaatgtacacaacaatgyggataagactttttttttaaaaggccgagtgaaataagctagattcaaaagagtagatagtggtcaggcatggtggctcacatctataatcccagcactttggaaggcctggggcgagtggattgcttgagcccaggagttcaagaccagcctgggcracatgggaaaaccccatctctactaaaaatacaaaaatttagccaggtgtggtgatatgtacctgtggtcccagctactagggagactgaggtgggaggatcacttgagcccaggaggcaaaggttgcagtgagctgagattgcaccactacactccaacctgggcgacaaagtgagaacttgtcttattaaaaaacaaaaggtagatagtgtatgattgtgtttacatgaactcttagaatcagcaaaattaatctacagttacagagagggggtgagtacaaagaggcactaaggaacttttggggataataataatattctattgtggttacatgggtatacacatttgttaaaattcatagaactatataytttgaatgagtacattttattgaatgtaaattataccatagttttaaaagaactttttaaaagtcaagatgcaaactggggaaaatatttgccacatgtatgacaaattaatattcttaatatacaaaatgtcatgcaaattgatataaaaagcattaagacctcaacaggcaaatggccaaaagacacagaaaagccacaaaagaggaaataagaatatctaataaacaggttaaaattaaagcaatgaaatactgtatttcacaaaccaaatgagcaaatttcacctatcaaatgagtttttttgtttttgttttttgctttgatgataatttttgttttgtttttactttaatgataatactagtattgtaggacaagatgagcactcttctggtaaaaatataaattgatacatttctagaacacaatttggaacactattatataagctttagcaggaacattaaagttaagacccaaaaccttaacaattttcagattatttgacccacttctagaaacctgtgctaaggaataaacaaagatgaatgatcaaaattagagatttacaggcaagagttttcagccaggcactgtggttcacacctataatcccagcactttgggaggtcaagctgggaggatcacttgaggtcaggagttcgagaccagcctgggcaacatgatgaaactccatctctacaaaaaattttaataattagcccaggcacagtggctcactcctgtaatcccagcactttgggaggctgaggcaggcagatgacttgagaccaggagttcaagaccagmctggacaacatgakgaaaccccatctctaccaaaaatacaaaaattagccgagtgtggtggcacatatgtttgtaatcccagctgcttgggaggctgaggcatgaaaatcgcttgaacctgrgacgcagaggttgcagtgagctgtgatcacgccactgtactccagcctgggcaacagagtgaaactctatctcaaaaaaaaaaaaaaaaaattagcgkgcgtggtggcatgcacactacttgggaggctgaggtgggaggcagagcctgggaggcagagtcwgcagtgagctgaggtcacactactgcactccagcttgggcaacagagtaggactgtgtctcaaaacaagaaaaaacaagtctggccatggcggctcagtcctataatcccagcacttaacaaggtagaggcaggaggatagcttaagcccaggagtccaagacctgcctgggcaacatagcaagaccccattctccaccaacaaaagggacaaaaaagaatttttattactgaccttgtttctagcaagaaacaatctaggataagccactaggttgagtaaacgctggcatcaatatgatgaactatcgaatattgtccatggtacaaacttaataaatatttctcaaatatactcaacgtatacactatataagaaccttagaaaggagtgagatgtgtagatgacttacacnnatgggtagagaaacacataaacaaattgtttcattgcagcaaatattggaaatcatctaaatgttcatcaagagaggtgaaattaggccgagtgtacttgctcatgcctgtaatcccagagctttgggagaccaaggcaggaggactgcttgaggccaggagttcaagactagactgagtaacatggcgagagctcatctccacnaantttttttttnaattagccaggcactgtcgtgtgtacctgtagtcctagctactcagaaggctaaagtcagaggatcacttgagcccaggagttcaaggctgcagtaagctatgacacgccactgcactccagcctgggtgacagagtgagatcttgtattgaaaaaaagaggtgaaattaaataaatcatggtatgtccacacaatgaaatgctatgcatctgttaaaaacaggccagatctaatctatgtcctaggctgggcgcagtggcttgtaatcccagcrctttgggaggccaagrtgggtggatcacctgagatcaggagttcaagatcagcctggccaacatggtgaaaccccatctctactaaaaaatacaaaaaaattagcygggcgtggtagcacatgcctgtaatcccagctactcgggaggctgaggtrggaggatcacttgaacctggaagccagtggaggttgtggtgagccaagattgctccactgcattccagcctgggcaacaagagtgaaactccatctcaaaaaaataaaataaaataatctatgtcctagattgttaaaaaawwtttaaaggtgcagaacagggcacttggaatgctactatttgaagggagaaaaaaataaaaggacasataaatatttatgtttatataacatcaccagaaagatacagaagaaaaaacaaaacaggtaagtctatactgaaagactagggtctgaggatgtgaaaacaggggtgacagagacttagatttactttttgctctcaattactttctgtagtgtttaaattttttaccatatacaggtttttctttttcaaaaaaacaccaccaaaaacaaaaacacagatttttttttagaaggaaggggagtgttatggattgagtttcttagaaggaaggagagtattatgagttgagttttttagaaggaaagagagtgttatacgttgcattatatcccctttatatgttgaagtcctaacccccctacaggttgaacatcccaaattcacaaatctgaaatgcaaaatcctccaaaatccaaaactttttgagcatcaacatgactcatgaagatctcacccaatttcccagaagccctcgctcccatcggactagaatcttcttttgagaggcctttccttttctcatccctattgcaaccagtacaaaaagcaaaacagaaagacactaaagcaaaaccaaagttttagtcacaaaaaccaaatgggttggcgagggaaggtggtggttacagggaaggttttaagctcaccaggccctgtagctgaggtttcaaaatggcagctagctggacgccatctggtctaaatctgctcacccaaacctccctccagttctccaagggatgtccctaattactagcacagccagctgccaacatggaatctaggtctcccttctttcaaatattagagatgtgagaccagaaagattacttcccaataccagagaaaaggctacgagggaggaacaagggagagaaggagaccttcactgcagcatgcaaggacatggcggacgcgtcccatcccatatctcagctattatgcattcccaactggcttggccaacatccagagagactccaggctggtgagtctgtgaatgtgaagtagagataagcaaggcggcgagggggagctcgcccactgttatatacgggctgcagcattgcgtggcgaggagtcaggggaatcttccatttccaagacatttctgcactcgatcctgctccccaagactaagaattctttmttggcttcctcccactccctggaatgtaactaagcagttaccttgagaacaaggaaaaattgggggctagggaggtgtatgagtgttttaatgtgttaaaaatcacatttaccctggatacttgtttgcaataaaacagagagtaggaaactccattcttaccttcatctatgggacaggcacccagtggcaatcattgtgagaaatagggagaggctgatctatgcttagggagctcagaaaatgctatgcttccttccagctgtagggaagctgagccactggggaagagtggatgcatttggacaaacaggaatggatggaaggctttctaggagaggggaccacatgagcaaagcctgaagaaggggtggttcttatctagcaatgaggaagtgtgaggagaggcaaagaaatatcttctagaagctgagggatcaggcactggaagcttatctaccttctccaactccagggtaccaccaaggagagcaaaatccagaaacaaggggcacctgcaaagtggtggaggaaagaggaggaaaggaatgtctgccccragcccagccccagggtcagatgccgggaaaaattcctgggattatttggtgctgtatgagatggatctggagccaccctggctccaagagggatgtgggtttggactggggctkccaggactggtctggggcaagctaaggacactttcacgtgtccacacttttgtacttgctgttcaccagtatctcctttccccccttctcctccctgttcatggaaatccttaaaaatcatctcctctgggaagttctcctgatgctctcattcagaattaacccaccattctttatgtcgcttcaacaagttgcttgtatctctttttccatttacgttttctttttcttttttttttttngtttgtttgtttgtttgttttgagacagagtctcactctatcgcccaggctggagtgtaatagcgccatcttggctcactgcaacctctgcctcccgggttcagttcaagccctgctcctcctcagtctcccaagtggctgggattacaggcacctgccatcacccctggctaatttttgtatttttagtagagatggggtttcaccatgttggccaggctggtctcgaactcccgagctcargtgatccgcctacttcagcctcccaaagtgctgggattacaggcgtgagctaccacgaccagcctacgctttcctatatgcctttttttttattttttgagatggagtctcactctgttgcccaggttggagtgcagtggctcaatcttggctcactgaaacctccacctcccggattcaagcgattctcttgcctcaacctcccaagtagctgagactacaggcgcatgccaccatgcccaactaatttttgtatttttagtaaagatggggtttcaccatgtcggccaggctggtcttgaagtcctgaccttaggtgatccacctgtctcagcctcccaaagttctgggattacaggcatgggccaccgtgcccagcctatgccttgtcttataattagtctccctctcttctaaatgtaaactctcagatgtcaagaactagatcttatacatctttctgaccccatcccccagcaccagctcttccccagagcagacactcagtaaatacttattgaattgaatatacagacccacaaggagcaacctggtactggcggacatttttgattcctgcatccattcattcatttgctcaacaaccatgtgagtgcctaatacctgccaacctggctcacactctctcacagagcacactcraattgtttcatcaaccagctaaaagtaagttcagtatcaattcagggcttcttttcagttctagaacatagaaaatttcacaggatcacctgaacaccgcagggcgggtgcagcctacatcccattgcctgtttctgtccagatggaaagtcacaccctcaagaaggcccctggggaagacagattgtctgggatgtggatgagggcccccacaggctctgcccagcccagcccagcccagcccagcccagcccacccaggggaaccctagatacacctatcacaggagatggcagttaagataactctatctacatacacagtaccctgtggatactaagtaaggagctggtcatttggaatgaggcaggagagctctaggaagtcctctctgcagagtagatgtggccatggaggtgggaggattaactgaaggtcataagaaaagtctgcccttctcagagatcaataagtgcaaattacttgagagtccaggaactgctctgccatggaggaaaaatacagatgggggcaggggcgggaaaggaagggggcaggttagggacagtcattgatctcggcgggctcttccaagtctaaaattgtaggattctaacctgaacctcccctgccaacaacttgaaagagttgtcttgagatcagggacatgtggagagaaagttgaatagcatgtcagataataaaccaagaagaaattgtgaagtcaaaacaagggataaattttccttatctctctaagacatgcatcaaagcagctgrctgctgtctgcctggcctgggaagatgataatggtttttaatggcccgtaaacaataggaccagcctttgtaataaagtttaaccaattaatcctctaggcttcctccctgcactctgcctactctccgctcctcctttctgtgatggggcaaccttcaggggtctgaaaagcaagggatccagcccctagacgcaaacctataggtgacaataagagttgcccagaggaagtgctaaagaaaattgcctctatcctgatctggctaaaaggaggaagaakccctcttttcagsgaaaaggagaggagagatgatgcatcaaggaatttgcacaagaggtaaacttcattcttattcaggagctcattcattcattcagcaaacattcatgaacacctactatgtgcaaggcatctgcagagggtgcaaaaatatacaaagaaaatacctgcccaagatggaattaaagcctggagggggtggtactgggaacaagacacattcacagatggccgggcgcggtggctcacgcctgtagttccagcactttgggaggcagacgtgggtggatcacgaagtcatgagatcaagaccatcctggcaaagatggtgaaaccccgtctctattaaaaatacaaaaaattagctgggcatggtggcgcgtgcctgtagtcccagctactcgggaggctgaggcaggagaatcgcttgaaactggaaggtggaggttgcagtgagccaagattgtgccactgcactccagcctgggcaacaagagcgaaactccatctcaaaaaaaaaaaaaaangacacattcacagatatcaatcgtaaaagttagtacaatagcctctgcaaaccactgtataagtccancttctttttccatttcttctttcatgtgccatgttccgcttggggtggttacgacagacaatattcagaaaatggaagaatcagaaagagaagaaagtggaacacacaagagaaagaaaaccaaggccctcctccctcctgccatggccctctctgtcttcagccctagttctggaaaagaaaagggtgtgttgtcactagaggcctccaggcaggtccatgccactgagtcacatttcaagctgtgtttgcttcctacaccaacaaggcatatcttttctgaattgtgcaatattctggccacctgggtttttctacttggtataccaactcctagtactcaacaaccattccctttactcttttttttttttttttttttttttttttgagacagagtctcactctgcacaatctcggctcactgcaacctccgcctcccaagttcaagcgattctccctgtctcagcctcccaagtagctgggactacaggtgcccaccgccatgcccagctaatttcttttttacttttagtagagacagggcttctccatgttggccaggctggtctcaaactcctgacctcaggtgatctgcctgcctcagcctcccaaagtgctgggattacaggtgtgagccactgcgcctggcccccctttactcttaaatacagtgtgtgccagctgtagtagtttatgcctgtactccragcatctcaggaggctgaggcaggaggatcacttgagcccaagagctttaggctgtagtaagccaaggtcacaccactgcattctagcctgggcaacagagcaagaccctgactcttaaaaaaaaatacaatgtgtaatggtgatataataattcaaaggttaatcatctctacttttgaaaacaataatgaataccttgctttgcatttgtttagcctcacatttttttcagagttcttcaaaaaatattatctcatgttcatgctacaagcaaccttggrtggtaacaaaggttaaacatcattatttccactttaaattttccctcctttctccatttgttttctactcaacaaacagtggttgagtacctgcyatgtgctaagcacyatgctgggtacagggtcatgcaacatagcagaaaaacagcagatcmtgccttcaacaggttcayagagctatggggaggagaagtgaggacgtggtccctgtctccagggtctggggsatcttctagaggagaagattgagacaagcattaaaagattatcatgggccaggtgtggtgctcacacctataatctcaacactttgggaggccaaggcaagaggatcgcttgagcctgggaggtggaggctgcagtgagccatgatggtgccactgcactgcagcctgggcaacaaagtgagaccatgtcttaaaaaaaaaaaaaaacttaatatgattttaccaggtagaaaagagaggaaaggggattccagagagtgggccagcaatctatgcacagagaaragtgagccatctggggcatccagaccatggggtgaggagcaatgaagggcaaaggctgagaaagactgaaragggaggctgggcccaaacaacggagccaagagtgccttgccaaggagtttggactttatcctgggggcaatgaggaaatcactgaaggttttaagcagaggtgggtgacgtgatcagatttgtgtttcagcaagattaccctggccacgggatggagaaagcactggactgggaagagactgggcagactctagaaacattcccaaaatagaattcgcaggactgggtgtcccactggagataggaggaaaaggagataatagaaacagccttctcacttgggcttgaggggccctcgtccaatataggagaccagtaagaaagccttgcccaaggtcacctcaagttacttgatggctaactcgaatcaagaagctcaagttccttctggtagaaacctcttagtctgcctcattcacattgatcagcaaataaatttaaccatcatctgccagrctttccttgttttccactttatacatgtgcactttttgtcctatggagattattaagatcattagggcaaaattccttttgacctcccataaggcctctcacagtacaagacaatatgtggtcaataaatatttgttattaaatcaaactccaggagccccaagaacccatcaccaggcattgccttacttacaacatgagatatttgccttctttaatccctaataaacagttttttgtttttgagacagagtcttgctctgttgcccaggctggagtgcagtggcacggtctcggctcactgcaacctctgcctcccaggttcaagtgattctcctgcctcagcctcccaagtagctgggattacaggtgcccaccaccacgcccagctaattttttgtatttttagtagagacagggtttcaccatgttggccaagctggtctcaaactcctgaccttgtgatctgcctgcctcagcctcccaaagtgctgggattacagacgtgagccactgcatctggccaacagtattttttatttaattcctagataaagtaattcctagatgcttgaatttcacaatccaagataatttttttttgagacagagtctcgctctgtcacccaggctggagtgcagtggcgtgatctctgctcattgcaacctcacctcccaggttcaagtgattctcctgcctcagcctcccaagtagctgggattacaggcgcctgctaccacacccagctaacttttttgtattttttagtagagayggggtttcaccatgttgaccaggctggtttcaaactcctgatctcaagtgatccgcccacctcggcttcccaaagtgttaggattacaggcgtgagccaccatgcccagccacagtccaagatatttctaacaacaacaacaaaattggagcgttcaatgtggtcttgccaacttttgttttaacaccattgtttcttaaaagaaagaacattgaatacatatccccaaagtcaggataatataattttaagatgaattttccaaattaaatcagagttcctcaacctcagaccaattaacactggactgaagaattctttgctatggcagtggaggggaaggagaagggggagctgtgggcaaaattgcaccagttcagaaccactgaattttttaaagtacgctttcttaaaaatccagttacactgtccttatattttggatcagtgaaaactatcacagactgccaccagtccataaacagcttttgggaacaagagactcagaggtgaagaatgtggaatttgaaatcagacttgaactcaaatcccagttccacctctcctcattccctgaccttgagcaaggcactgttccaagcctccctttcctcccctgcacagcgaggacaataccaccccatcccagttgtggggaggattcaatggaatagatgtgacgcacttagcatgtgaccatcgggaacggaagtatgacattattaacattatttctaccacttctataacatatgtggtatctaatacaaattaatgactgctacccaaatttcagactttctgggtcaaaaggaccttacacataatatagtggactttcaataaacacttaccaaatggacaaatgaaccccttgtcaccccgatctcactagttccttccctgaaacccgacacatctgagtccttttctcctttactaaccctttctccaatcctgctcatgggaattaaagctgtaaaataagcctggcgcacctygggcctctgccctgggctctgtgggtgggagcactgtggaagccgtatcaatcgcccccacctatgagagcctttcttcagggccagccatgaacgtyccccatgtcatcagcatcttcaggctactgctgtccttcttggatatttaacctggaggcgggccagggacagaaaaaggaggtggcaagatccttgaacaaaaggagctataaaagggcgttgggggaagcaaggcaaacggcagattaaacaagcaggcacctcaaggaaacgtgacgcgggaggggattccgagcctctctgtctgcttacttgacagcaagcaggtcagagttcctgccatttccttctagtagaaaccccaccaagaccacctccccgccttggcaggcaaagcactggtagctctcccaagggaaaaaaaaaacaaaaaacacacactccttgttacaaaccagacacagtcctggacagagcccagctaacaataaatttctggggttcatctcacaagtacattaagtatcttctgacaatctcccaaagggctgggtttttctggccatcacagggctgtagaatattgagtacaaggagagggcttcaagaacaggggatccaagccctcgtttcattgatggggaaactgaggctcagagagggggaaggaacttgttcaggatcatccaagtatgctccygtcagtrgcagcactgagccaagaactcaaggcttcagttttggcactgggttttgccagaggcttgaaaacataccaagaagtggaaggtgtactatgagctaaatctcacttttcctgaaaatatagatgtgtgctcacacaggcacacatgtgcataaaaggtagggaaagaggaaaacaaatgtagcaaaatgctagtaaatggtgaatctaagcaaagrggatattggtgttcattgctctattttcacaacttttcagaaggcttgccatttttccaagaaaaatctgaggaagggctaggtgtggtggctcatgcctgtaatcccagcactttgggaagccaaggtgggaggatcgcttgaggtcaagaatttgagaccagcctgggcaacataacaagaccccatctcaacaaaaaaattaaaaattgccaggcatggtggctcacacctgtagtcccagctactcagtaggctgaagcaggaggatcgcttkagcccaggagttcraggctgcaatgagctatgattgcactactgcactctagcctgggcaacagagtaagaccatgtttctttaaaaaaaattaaaattaaaaaataaaaaattttgagggagaaagataaagcactaactagcaatctaagataaaaaatttttttaaaaaaatcacttggaaaagagtaggaattcctccttcaatttcattcagtttccctagctagggactaatatccttagaaaaagttataagaaatccagaggttaaaggggtgggactccaaacaagtaagagatcgccagtattcatagcagtccgcagctacagcaatcttagaatccaaatacgatttcagatattttgtcccatcagctcctaaaatacatatattctggtcacaccatgtatcctctgttgtttttggtgcaaaaagtaaagtaaccaygaactacagatagggcaaatgtcagaatttttccaggggactttatcacctttgcaatacaggtagtttataaatgcaatacaatatagtttaatttctattcaatttgcaaattctttcacatgagtaaatcatttaatcaaaatccacatccaacccacactcaccatgttctctatccatattagtatttggtttgggccatactgggtccataatccagccctgaaaatctatcctgggccacatatataactcataccaatagcagggcactcaaggcatgaagatttgagggaacacaacctatccaagaaacctcaaggaattccttatggctgaagtaaggtctgaggaaaccatgagcaggggaatatgacttggagagaaggtagaggttaaatccaggagggctcatacacccaacaaaggagttggaagtttatccttcagaaaacaaggagtcactgaagggttttaagtaggcagtgatataattggatcattctggcagagtacagatggatgaaagtaactcaaagctaggaagactatcggaatgacaaagacctgaactaaggcagtctgagcgggagtgaactgataacacattaggaagagctattgaccacagcaaatggacaaaactgggtgggaagagggcagatgtgtctgagagagacagaaaggatcccagatgacgtctagcttggccaactaggtagacgatgacaacactcaccctgacggggaatccgggaggaggcgaaggcttggcagaggaacgtggtgagttttgaacgtgttgaggtcctggttggatatacaaatatggagctccagaaagaagcccaggatgaatatgtgcattgggagtaaccaacattaatgtacggggatggatgccaagggtgcagaggaggtcagccagagaattgggggcaaaacaagaactgagtcaaggacagaaactctgggggaaaaaaaaaatttaagggcagtcagggaagaagagaccccaaaaaacgttgaggagtagccaaagaggtaaagacctaggcctgcttttaagtgacccactaaactcctccatctccacaggctggtcacaccatgctggggctggggaaggaataatcatgtgttaaaataaactcatttctcaatgaaaagacaaacagcccaatttaaaaatgggcaaataacaaatagacatttctccacagaaaacatacaaatggccaatagacacatgaaaacataggaagtatcattcggtcattagggaaatgcaaatcaaaaccacaatgaggccgggcatggaagctcacgcctgtaatcccagcactttgggaggtcgaggcaggtggatcacttgaggccaggagttcgaaaccagcctggctaacatggtgaaactccttctctactaaaaatacaaaaattagccaggtgtgctggtgcacgcctgtaatcccagctgctcaagaggctgaggcacgagaattgaacctgggaggagaaggttgccgtgagccgagactgcgccattgcactccagcccgagtgacagagtgagactctgtctcaaaacaaacaaacaaataaacaaaaaacccacaatgaggccaggcatggagtctgacgcctgtaacgccaacactttgggaggccaaggcgggtggattacttgaggtcaggagtttgagaccagcctggccaatatggtgaaatcccatctctactaaaaatacaaaaattagctgggcatggtggcaggcatctgtaatcccagctattcgggaggctgaggcaagagaatcacttgaaccggggaggcagaggttgcagtgagccgagatcgtgccactgtactccagcctgggtaacagagtgagactgtctcaaaaaaaaaaaaaaaaaaaaaatcagataccacttcacacctggtgggatggctagagtcacaaagaggtagaggaactggaccccccatacatcactgattggaacacaaaatgccacagtcactgtggaaaacagcttggcagttcctcaaaacttcaaacacagagttattatatgacccagaaactcctcccctaggtatatacccaaaagaattgaaagcatatgtccacgccaagacttgtacatgaaagtttgtgttagcattcttcataacagccaaaaagcagagataaagcaaatgtccatcaacagatgaataggtaaatcaaatgtggcgtattcatacaagggactattattcagccataaaaaggaagggagtactgaaacatgcaacaacatggctgaacgctgaaaacattatgctgagtgacagaagccagatacaaaggccacatgtgttatatgatttcatctctatggaatatctagaatagggaaatccaaggagacaaaaagcagattagtggttaccaggggtagaggggacaggggagtggggagtgtctgcttcctgagtgcagaatttcttttttctttttctgtcacccaggctggagtgcagtggtatagtctaggctcactgcaaccaccgcctcccgggttcaagcaattctcctgcctcagcgtcctgagtagctgggattacaggtgcacgccaccatgccccgctaatgtttgtatttttagtagagacgggatttcaccgtgttggccaggctggtctcaaacccctgacctcgtgatcctccctcctcggcctcccaaagtgctggaattacaggcatgaggccaccatgccaggccaggatttctttgtagggtgatgaaaatgttccggcatcagatgtggatgatggcggatgtactaaccaccactgaattacgcactttcaaatggttagaatggtgaattttatgttgtgtgaattttctctcaacagaaaaattcaatcatcctttacaaagtgacccacagccacaaggagctggggaagcagtttctccagcttgcagcaggagctccagatattctgagtaaagaagccaaacagcctgcttcccgggagacccttaaatgtcttcacacatccacagctgggggaggagacgctgatgaacaggagaagatggagcatcggcctcccctggctactcactctgtgctcgggccgcctcgcccacttgtaaaaccccaaatgccagggtggcagcaaggcatacatgcaactatgacttgacccgcagcgaggcagcaaccaggtctcacctgggcatagttaccccacaaggacaggaaaggagaaatggtttccaggcccaggacacccagaagccaccaaaaaccaacctcatggttcatcccccttatttgactcttcgacacctaaaacctgtgcgttgtgttcaagatacacccgccggagaccacattcccagacatcccgagggccagccgtcaccacasgggtgcctcggggagatgctggagacacaagtggctttgaaattagcacaacttacatggcctccaggtctgctgtggaaatccaggtccaaagaagaagccagtgaggaacaggaggctgatcattgtgttctcagaaggggttggagcctctggggagggggcactgaggacagagcacggtgttctgcagatcatatcacatctctacttccctctccagtgatatgcttccctcrctctcccattttgctccctctctcctgccaaactcccagggcaaccctggataataaagtgaccgaatgtgaatgcttccaggtggcacaccagcactccagagaaactgtcagagcagggggcaaacccctggcctactccagccactggataagcgcaccctcctccatgcctccctgctcctgcctgccctgaagggagaaggagcgcaatgaaactaggtcttcccttggggttctgaccacctcgtggggagattatgattgccctgtggttgccatgcctactgtgatgtcactccttttatcagtctatctggatgaatttttcccccttttctctgaaggaaacctcctacccagtgcttaggagcccattgggagctcccgcccttgtcttatctcgatctgggacctcagaagactccacattcctaacaggactagctctcaggatgaagaaaatctctctcaagctggtcaatctactcctagatttaagcagaaccaaacagaacctatttcaacatcccctctcagaatgcaaacaggagacggctgtgtggaaagatccaatcacctttacttaattggtcagaataaaatcacttttttctttttaaggcagagtttccttctgtggcccacactggagtgcactggcgcaatctcagctcactgcmacctccacctcccaggttcaagcaattctcctgcctcagcctcctgagtagctggaattacaggcgcgcaccaccacacctggctaatttttgtgttttttagtagagacagggtttcaccatgttggccagactggtctcraattcctgacctcaagtgatccacccgtctcggccacccaaagtgctgggattacaggcatgaaccaccacacctggccagaatcactttttcagtaaaataagtgcaaagaagaatgagggtgkgggaaaggtttactgatcccacactttgtcatgcacagaggaaggcaaagaaagaaagaaaactctttcctaaatgatcacttgtctccagcaggtgtatcttgaccattccagccatggatctatagggagtttcatgccaatgaaaagcatttttttggggtcctactatgcatcaggcactgtggcaggtactggagacttagtcccagcccttaaagaactaataataggatcatggccaggcgtggtggctcacgcctgtaatcccagcactttgggaagccgaggcgggtggatcatcagaggtcaggagttcgagaccagcctggccaacatggtgaaaccccatctctactaaaaatacaaaaattagctgggcgcagtggcagtcacctgtaatcccagctacttgggaggctgaggcagaagaatcgcttgaacctgggaggcagaggttgcagtgagccaagattgtgccattgcactccagcctgggagacagagcaagactccatctcgaaaaaataaaaaaagaaaagaaagaaaaaaaagatcactgttcacaatcacaacatttacacagcctccttcaaaagaatttcttctctagaaagataagctgagagaccagacagttygtctgcggccttcatgaagtgaaaggaggcagagaagaaaggagttggccatggacaggttttgccccagatccttgagtgaagaccccagcctgctgcaagctttttcctcattctgtcctcccctcctggaatctgtggcagcttccacaggcggtgaaagaaggcagcaagcagtggctccagtgccagctgcagcaaccacaccaggggaatggggccatctgacacagagagggtgtgagggccagggagactgtccctgtagccagctaacccctccagtcaagtcgactttcacaaaatgggcctgctcctggaagtcattgatgccattgttaaaacacagcaccaggccgggcacggtggctcacgcctgtaattccagcactctgggaggccgagacgggcagatcacttgaggtcaggagttcgagaccagcctggccaacatggtgaaactttgtctctactaaaaatacaaaaattagctgggcgtggtggtgcacacctgtaatctcagctgttcagaaggctgaggcaggagaatcacttaaacccaggaggcrgaggttgccatgagtcgagatcgagccactgcactcctgcctgggcaacagagtgagacyctgtctccaaaaaacagcaccctggagaagacagcagtccattcacactggaaacatccagacttattacataaaaatggcaattagtggccaggcacagtaactcacgcctgtaatcccagcactttgggaggccgaggtggcggtgtaatcccagctactcgggaggctgaggcaggagaatcgcttgaacccaggaggtgaaggttgcagtgagctgaaatcacaccactgcacttcatcctggatgacagaacgagactccgtctcaaaaaaaaaaaaggcaattactgttggcatcagcagcacagttgttttcagccaaaacttaagacacagaactagccttatctttccagtatatggtatgtctcttgctattttttgcaaattatctatcatatatattatcatatatattctttttttttttttttttttttttttttttttggagacagaatctcgctgttgcccaggctggagttcagtggcatgatctcggctcactgcaaactctgcctcccgggctcaagcaatttttgcacctcagtcccctgagtagctgggattacaggagcacgccaccacacccagctaatttttgtatttttagtagagacggggcttcgccatgttggccaggctggtctcaaactcttggcctcaagtgatccatctgcctcagcctcccaaagagctgggattacaggtgtgagccaccgcatctggccatatatattcttttaatggcaagcgggaacaaaatcgtattcccattttctgaatgagaaaaccaagcctaaaagagggactcccaagtaatatcaacttgcaaacctatgaatttttatcttaaatactggctttgagggacctttggcaacagcaaaggcattcggcaatttgtgtggaagtcacattaccagcccaccgaataagccacaactatgagttcttccgtgattagcggggctggggatgtggcaggcaggcgtggaagtgagatccacgtgaaagacctaagcactgactccccgagggactggcgaaatgacgcaggggccagatagatgtcagatttggccaaagtgtcctcctttctcacaagcccgtctgcctttcacctgtcctgaggtaggacaaccggatgccctactttgctgtgcagccccactctcttggggacagtagcccaaacaggctgctcttgctacacacagataagaagctttgccacccaaaaccaagaaaggggccggtgaggacacacagggaatgctcactcagtggtggctgagtttgtggaagtagcaaaacctgcactgtaggacccacacctgtgagagagggccccacgggaatctcagcttggatcaaagcaggcgggtgctcactccactgagggcagcagagcccagctccaggtgcgatcaggaagtgacctgagaagctggagttctggactcacagacccaggcttgaatttcagcaccactcagtcactgtgtggtcttgagtgacttgcccttgtttttcctcatccataaaatagggataaaaatacctgaccttgaaaaattatacgaatgccagcacacagtacatacgcacagcagagacaggagctagaattattgatttgccaaatgcagcagtgtctggactcagccgcccacttctgaccaatggccttcacttgtaacacagctgatctggagggtaaagcctgcagccgtggaaccaagctctcgccaaggtaactgacccatgtggggctcagagccttgttcttactagaaccactctagtttgtttgattttttttatttatttatacacataattctgtgcattcctttatgcatatgtatacatatatatgcatatgtataatttattcaaatagcatcatatcactgatactattctcctacgccctaccctcccacatggctactcacagcccctgcctttccaggcggcccgtgttaacatcttagtttgtatccttccacaattctccccatattcatgtaattttacacacacacacactgaatagtgaagttttggacagtgtgggggcgttattgtttaacaaaaatggaattatacatcatacacagtctctccctctttttttattctaccataatttgccaaaatccttttaatggttctgttataattcatgatataaaggtgtcaaagctattcagccattcctctactgatgggaattcactcagtttcaacttttggccactaccaacaaaaaagcaataaattccttgacagtatgtcctaaccaaagaccattttccaaccagacaaaaggccaggtcccaggatgtgagggtcacccatgaaaaggacctcatgatgaactcctgattcagccacatcatccttaaaattctccttagaagagagaccctctgctcctagaaatacaaattcccaggcatgggtctggcttccaaactctagctcctccagttcttactgcatcaagtcaattctgcaggtcttcattttcccatctgtaaaataaaatcataactgccttaggcggcaggatttgagagtgctttagcaagggatttttatgagggagcagtgtgtgaaataatatttttgctgtaattctgtgagatgttgtttctagnttgtntgggggtcagggaagggagggcaaaacagaactaacagattcaattaagttccctctgagactcaaggtccctatttataaggtacctggggctggatgggaaggcacttctatcttctgcatttctgaaacacctggtactgtggttgtttacaaggaaaacttaggaactggacaggggagctttggagtgtctacttgcccagttttgtcagattccaaagaggggcaactataattgaaattataagaagaatggtccaatcagcaaattttggaaaatctgtaatctcactggtgtttgattttcactcaaaaattccctaagctctacatttcattcagtaaaaagttggggttaggggagagatggagaacttcttttgcaggggtatagtgatttatttggtctattcttgaaaaaaaatgagaaattttgggaaaacaatcttaaaatttccatttcgagtagcagttctaaaagactttcaagagcctctctgaaaagaagcagttacagcaacttgaatgaatttacctggttatcatatggctcacatgcatgagagtgggggagaagacacggtaaaatcaacagagttcgtgtcatgatattctgctttaaaacccaaatcaaggccaggcacagtggcttatgcctataatcccagcactttgggaggccaagataggatgactgcttgaggctgggagtttgagaccagcctggaaaatatcatgagactcctctctctacaaaagaaatttttttgtaattagctgggtgtggtggtacacctgtaatcctagctattcaggaggctgaggtaggaggatcgcttgagcccaggaggtcaagcctgcaaggagctatgattataccactgcactccagcctggatgacagagtgagaccctgtctctaagaaaaaaaaaaaaaaaacctcaaaacctgactatagaakaattttcttcatcaaaatcgaatcaagcagataattggcacccctttggaaaaggattcagcagcctctactgaacatacgcctgccccatgacccagtaactcccctgcaaggtgtatatacttaaggtctccaaaagacaagtaccagcatgttcccagcaccactactcatggaagacccagaccaaaaactaccacatgctcatcaaaagtaaaatgggaaaakaaatcatggtgaatttacataacagagcactatatagcgatgagaatgaatgatctacaaccacagccaacgctgggtgaatctcacaaacgcaatgttaaaggggaaatccagctagtaaagtgaacgtgctagaagattccgttcgatggggttagactcagaatagtcacccttggtgggatggggtagggagcgttggggtgcctggaaggggcacggctaggcttctgtgatgtttcttcatctgggggtttgtgacacaagcatgctcaacttgtgaattttgggtggtgaacatatgtgcactttttggtatgtatgttatacttcagtttttaaaactkaagaaattagccaatgaacaaaaataaacatgattgtgagctgggcatggtggctcacactggtaatcccagcactttgggaggccgaggcaggcggatcacgaggtcaggagtttaagaccagcctggccaacatggcgaaaccctgtctctactaaaaatataaaaaattagccaggcgtggtggcagacgcttgttatcccagctactcaggaggctgaggcaagagaatcacttgaacccaggaggcagaggttgcagtgagccgagatcataccactgcactccaacccgggtgacagtgtgagactccatctcaaaaaaawaaataaataaataaacatgattaaggataaagcaatccagyggacaaggctcttggagccatattttatttgkcatgtatcattcyggggagctctcctctgtcaatgccaagactagctagtcgagtgtggagaaaaggcattctgtgagaacagatgaaagggaacagagaaactggcactttctttggaaaagagttgtttccaaaacctagatgtgcagcctctaccccaggtaattagtccaacacactatccattacagctgagtccgggtttgcttcaaaagcatcgggggttttttgggttttgcttcccttaaaaaaaaacttgttttgaatgaggggaaaaaggcgtagttaatttttatacagaaatctgttaaagagatctgatcaatggtgacaaaatggaagccagagatggaaaagattcactgtgaggctctggcactgaaggccaacttgggcttccattcagttcaataataatatttatcatagctgctaacaatttttttctcttttttgagatggagtttcactctggttgcccaggctggagtgcaatggcgtgacctcggctcactgcaacctccacctcccgagttcaagtgattctccggcctcagcctcctgagtagctgggattacaggcatgtgccaccatgcccagctaattttttatttttagtagagatggggtttctccatgttggtcaggctggtctcaaactcccaacctcaggtgatccacccgcctcagcctcccaaagtgctgggattacaggcgtgagccaccacacccagccaatagctgctaagacttacgcaggtttacatatgctaggcattgctctctgagcttatatatattaactcattccatctctatctatgaggttgggattgatataatccccactttacacccagagagggtaataacttgcccaaagtcacacagctaataagtgacaaagctaggcagtttggctagagtctgtgctcttaacaattataccatattgtttcctagtaagcatttcttatgcccgtactatgtgctgggcaccatgctggacaaaaggagtactgagatatataaaacacgggtacacacataacaggttctagtccatgcaatgatgagaatcatacaggcattctgaggtctaatttcagaacaaaacgttagaaaactgcctccacacatctggacattaagactaaaatgcagtgcctgttttctcattggtattattctattcaatagagtcaattttaagactaagcattccttgacaccccacccatccttgggtcatgaaactcaataaagctctcttcattttgattggaggggggaaaattccccgtaaatatgtttgcttctttttcctgaatcaccctcttgtgtgaaaaggattgcttaccactgatctaacagggtcttgaatacagggtccctcagagggtacaagaagcccaggtgttcaggttattaaaaaatgaagaaatgcaaagcaggattacaacatttttggcacattatagatcctcacacaacaaatttacattttcacacacactcacgcacaaacacacatacaaagtcaaatacacaatgtaaaataattatgatcacaagaggatgataggctctacatttttaaatattgactcagaatgccctgggaatgacgtggtcaaggcacagactgtgcatttgacactttgtgatgaacatcttggtgcacatataatctagtgcacagataatgtcaaagtctcattagaatcctccatggaaccaggtatggtggctcatacctgtaaatcccagtagtttgggaggtcaaggccagacgatcacaaccaggagttcaagaccagcctgggcaacatagtgagtccctgactctacaacaaatttaaaaattagccaggcgtggtggcacccgtctgtagtttcagctacttgaggatcacttgagcccaggaattggaggctgcagtgagctataatcgtgccactgcactccagcctgggtgacagagaaagaccttgtctctaaaaagaagcctccaggaatgggaaacccaagttaaatcagctcccactccaccctaactcccttcctaagccttccttaagggaaaaagaacaaaatactgagcccagtagtaaggaaagancagtgaaagccccagttaggaaaccatgaaagagaagaaatgaggtacacagggagaaaacgtggatgaaaaccctagactatggccaccaacagacccaagctagccaggtgtagacctctgtgacacctagaggtcaagtccaagaggtcagctgaagttacgaaaggcaggcaggaactcaatcagctacctacttgtccacgagctagccctccccaggcctggcatctatgcttacctcctggcccactcctgctggcctctccacaggcacaggtgaggccctaaacaccaggaatcttctaatgtgtgctgccttctcccacgtctgtcccatttcctaggagttaatcatggtgcccattgcaacatggcacccaatgccactttccagagtagtgtgacgtccaattccaagacctggaggataaaaggtattaaagctcctgggaccacagaagagacagggcagaaagctggtggaaaaccatctccaacatctgtttctttttctgttaaaatctatccactgtgtgaattgccaaggaaagttaagattcctgttctgaaacgagaagggttctcttttcacatgacacctgcagaagatgggaaacatgataccccctgcagatcagaggacaccggctccctgtaagaggataccccaacccttgtcagtgcagcacccggcagggcgatttttacatttttctcctcttgctgaagggcctccagaaaggccaccagggctttccccaagagtaaaattctccccagctccctaggaggtctcactgcccaccacccctttatttagctaagtagcagagtttttattttactgtttattttattttattttattttattttattttattttattttattttatttgagacagtctccttctgtcacccaggccggaatacaatggcatgatctcagctcactgcaacctctacctcctgtgctcgagcaattctcatgtctcagcctcccgagtagctgggattacaggcacgtgccaccacacccagctaatttttatatttttagtagagatggggtttcaccatgttggccaggctagtctttttttttttttttttttttttytgagacggagtctcactctgtcgcccaggctggagtgcagtggtgcgatctcggctcactgcaagctccgcctcctgggttcacgccattctcctgccacagcctttggagtagctgggactacaggcgcccgccaccacgcccggctaatttttttgtatttttagtagagacgaggtttcaccatgttagccaggatggtctcratctcctgaccttgtgatctgcccacctcggcctcccaaagtgctgggattacaggcgtgagccaccacgcccagcctaggatagtcttgaactcctggcctcgagtaatctgcctgcctcagcctcccaaagtgctgggattatgagccactgcacccrgccagtagcagagtttttaaataacttccagagccctttactggaracacacccaagaagatgggctcttattcttcccacagaggactatagaccatcaactaaattcactggctcctactcaagctatagaaagctgaggaggaccttggaacatcctctctaaattcctcccctagttccagtccaggtaaacaaaaattgattctattttttcaaaacaccagccccttcagatggcctggttaatcttcattaacatgttatcttcattaacatgtttatcttcattaacatatttctcagtgataagaagggcccagggttcaacatcccactttgcatccatgcagacaagggctgtgggaagctgtaaaactgaagaggcggtgaatccaggagggattccccagatatccgtgagttggtgtttgactttcttgaacacgtctttcctttactttacacttacacttactgagcattcactctggaccagaccgcgtcctaagagcttcacgtgtgtggtcattcaatcctcaaaccaatcctatggggtaggtactggagttaagtgatggcgctgggattttaacccagaagtctgattgcaaagcccaacttaccatgagggccacgacatatgtctctacttacggattccaccagtactcttgacaggagcatttacctcactatattataagccttgatctacttttctatctccctgaagcataatcagccataatctgctaaccgtgcctcagttttcattctcctttctatttttttttcagcgggggcaggggagacagaatcttgctctgtcacccaggctggagtgcagtggctcaatctgggctcactacaacctccgcctcccaggtttaagtgattctcccacctcagcctcccgagtagctgggattacaggcacgtaccaccatgcccagctaatttttgtatttttagtagagacgggctttcaccatgttggccaagctagtcttaaactcctgacctcaggtgatccacccgcctcagcctcccaaagtgctgggattaaaggtgtgagccaccgcccagcctcattctcctttctttatttttatgatagcctctaccttgagtttcacccaagcctatggccatctgctccaaactacatttcccaacatcccttgtggccaggtgtggccatgggcctaagctaagccaatgggatatgagtggaagctccttaatgacaagctacttgcctttggatttcacctcctgcttctcacatcctgaaatacagacttaaggatacaaaatagactaaaacctgggtccatgaatgatgactttctggacctaccttacctgcctggtgtgctcgccaaacgacttatttgacaaataaataaacttctgtcttatttagcttttttaattttttttatttttttttggacacagagtctcgctctgtcgcccaggctggagtgcaagtgcaatggcgcgatctcggctcactgcaacctctgcctcctgggttcaagckattctcctgcctcagcttcccaagtagctgggattacaagcatgcaccaccatgcccggctaatttttgtatttttaagtagagacagggtttcactatgttgcccaggctggcctcaaattcctggcttcatgtgatccgcccgccttggcctcccaaagtgctgagattataggcatgagccactgtacctagacttatgtagccattctatttggggacctctttgttatagcagcttagcctgtatgctggattcagcacctgaagtcccacagcttgtcttattctattcaacatctccagaaccctttcttagggcttggaacatagtagttgctcagtaaatatttgttagctgaatgaaaacaccattatgtaaagcaggtagtaccagggctaaacaaactgatttactcaagctgtgcaggtgtcccgtatccaggtgactacaatgtttcctgctttcctggaaaacaggagttcaggacagagagagtaggtttaggaaagcatttgcaataggaaaggggtaagctttcactgcatctgttgttggctctctgctgagacaacagattttgggcttaatcaaaagttagctgaggttacttcttgtctgataaaaataatgggctccatttgagcacttactgtgtgccaggttctgtactaagcgcttcacatacattatggcattcattttcattcaattctcacaataaccctacaaggtagaaaatattaatatctccagatgaacaaaccaggcccccaaaaaagttaaataacttgccctagctgcatggctcgttagtgacaaaagtaaaattcaaacccaagttgtttgagcctaaacttactctcttcataaccaatctgccactctgcttctcttcctgtgtgacaagccaatattcccmactatggttataagtttcaagggctggaccacgttttgtgcttatctcaatagacgccacaggcacggagcttccactggtggctgtgacacttcttctctgtgcatgattggtgaggggttgcacacacccaccaggagacatgacggcagagggcaaacactctgagacccagggtccacccagctctcttttgccctctcctctccctgggctgccccggctgcctccttgacctctgcactcttctgcccacgctgctgccgcccacatcttggacagcatcccccggggccgccttcctgcctgtctttgtgtacaattcctgccaggcccggcagttctcctagctaaagccggcaaggtccagacctgcccgtytggcctggtaatggtgtggtccacatttcacctcccaccttcaccctaacttcatcctcatggccattctttatccacaacaactccttcctccccattccctagactcagcaaagcagtcaggagctaggcaaggtggcctttatcccagaggttgggataaacctagggctcataaatctagggctgtgagccaaatacggcccctgggattgctttctggttgtgcactatgctttttgaaaactgagttagctagktttaggctgggcacagtggctcaygcctgtaatctcagcaatttgggaggccaacctgggtggatcacctgaggtcaggagttcaagaccagcctgaccaacatggtgaaaccacatctttacttaaaaaatacaaaattagccaggcatggtgtcatatgcctgtaatcccagctccttgggaggctgaggctgaagaatcgcttgaacccaggaggtggaggttgcagtgagccgagatcataccactgcactccwgcctaggcgacagagagaaactccatctaaaaaaaaaattagctaggtttaaagtcattagaggtcatataaaaatgcaaatttcaaacttctctcagaaaatcaggagccgtgacaacactgggctcacctccccatgtggcaaatggcttgggttgaatgtgaacatcctccctggaagggcataaacttcccagttgaccacagtacagtcccccaacccccacctcccaccaactccctattcttcgtctcctacaggtttacatggcctgactagcccccagaggcattggagtttgacacgcccacagcagtgcctccattttgccgatgagcaaactgagaaaaggcaaagagaaattagtcccccagatctccaagtgagttcatcagcaaatccagggctggcaatcattagacaatatttatccagctcccagatgtccccgcccctgctctgttcagtcactgcactcatccatgtggctgccccaatgccttgggcatgccagagagacacctcattctttcaacacacaggtcacaaacatcttttgtgccatgacaatctgattctcctcacgtcaccccaagattaactcttttcaaatctgtggttcagattatacaccctgaagctgctgaggggtgacctctcaataaggctaatctcccctggacctaaatactggtggggcgtgtgtgcatgtgtgcatgtgtgtntgtgtgcgcrcgcgcatgtgtgtacccatgtgaactcgctcatgcatgtgcttctagattaacactctttcttctcattaacttcccagacaggtgagaagtcaacatttgccccagttagagaaccagaaagtatcagtcccactgccccatctaaaggggcagcagctgctgatggttgccatagtggaatgaagattcagggttgccagatctttcaacttttcaagaagccaggaatataacttagaagaggggagcaatggtctctaaagacctgtgctgagaaacaagttcctaagtgcttgggagaatttatgaggaccrggtgctagagaatgccgggaaatgaaygctcccctttgaacgtcccattggtgaggtcagaactatgtcctcaatccctcatcagcctatcccaggactctgaagaggaccccagggtgcttggctggctttgccttccagcctaagaatgtctttgactaatatttttcttaatccctgtttgctctgtcctcaaaacaagcctttttctctttttcttatccatcttctccatagagccctcaggttcttaactcacacggcactatctggatctttccagtaagtaggttgccgtttccatttctttgattaaacaactctaacaaagaattcattgagatgaaaatgcttatcatgaagcaggtaacatccttttcctccccaaaccacaagcaattaacatataaatggcctggcaaagggacttctttgagaggtggcagattataactactcttgctcctacacggataaagcttttttttaaagacaggaaagaacaatttacaaatgagaaaatgtcacagatggccacaaactaacttcccgagggatgagtattttgatgcagatacttcttcaagtgaaaaatgtacaatgtacaaaatgtccactygaggatctgttcctccccgtgtgggtaatcgccctcctaccacgggcaacgggtaggcaaccgatatgcccagaaaggcggccaatgggaggacagctcgcccagcctcccgattggccaggcccgccaccagctggaaccatggcgagctttgaggacagcagagccacttgatgggattctctctctcttcaaagcatagagcaaacatcaattaatcctcaaaagacgctttcaagaagaacattatcccttttggagacgcagaagctaagaggtgccgcaggtaggtgaagggaaggcaggaagttgaagaggagaggagaaagtggagcaccgggctttcagccccagttctggttctcctgagagagtcaagttgcaggagaagaatgaacctgcagaagccgggcagggagaggtggtggagaagccgctgctcttgggtgcgcccctcaaggcttcccactgccccatcccctaggagaccacggagtgaaaaaagttggaggcctaagtacagccgtgtgtacccagccgggcaccagagttaagacaactggacttgtgctcaaaaacccttctttagtaaaacawcccgtaggagtctgtgggaggaggaaaaattgaagtctggatgcaatttgccacactgagtctgttctggtaaccgcccccaacacactcacacccccttgcctgaaatggggagaggggtgggatcggtgtgtgtaaacagaggcactgccctgcctggctgctctttccatcttaggagaaccaatccagaactttctacggctcacactctgatcacagcctgtcgccatgattggcaataaacgtcacacattctcacgttatacatttattcgacctttaatattgtgctctgagattcctggaaaacttgtatgtcattggtcaaacgttataaaaacagcccactattttttccccactcacatcgtccgtgttgactgccttacacaccratttctacatggaatgtttttagcctgcattttaacacttagaataactttctttgccacacactacatacatactgtttgcatcaataaacagagcccgtgccacatgcaagttataggtttattggagacatttaagtgtttatagaaaggacttttctaaagaatctgaatgggagttctctcaatttaccaatagtcaaagaaataaagaaaattaccctacagctgattttttttwaattaaactaccaacaactattctgccatagccttgcgtgtgtgtgtgtgtrtgtgtgtgtgtgtgtrtgcatgcttgctgaggcatagaaaatatctggaaggatttacaaaaactccttagctttggggaacagaatggacagacagagagaaaacctctttttttcttgttttatgttctttaytgtgcattgtttacaatcagcatgttgttgtttttytttttaagactagtcaagagcagcagtgagaaagggggaaggaaagaacaaggagttcaatctgtaactgtgaacaatcaattgagataactcactaccctcagactagccaccatgttgctttttaaatgtttcaaatcacaaaatgaaaaagttactctaagatcatctattttttccccaggtgtggtattttgtccccatgcctgtgcaaagtaagccagtagaatttagaaatagcttgctgcctttttttttttttttttttttttgagatagaagcttgctctattaaccaggctgcagtgcagtggcacgatcttggctcaacacaacctctgcctcccagattcaagtgattctcctgcctcagcctcccaagtagctggtactacaggcgcggaccaccatgcctggctaatttttagtagagacggggtttcactatgttggccaggatggtctcaaactcctgaccttgtgatctgcctgccttaggctcccaaagacctgggattacaggcatgagccaccatgcccggcctgctaccttttttacatacacaaaataattgcaaactttcactgcagtactgccaaccctcatgtcaccatctacaatgtaccacgtcaagaaaggacaatatcttcaaacccacttaccagaagaaaaggttgaagctgtatttggcaggatactgacatacaaacctccaagatctgggaaacaactcaggctccttgacttgacttccttaacgatgacttgagaaacaccagaaagtccagaacacataaactcatgaaaccaaccaatagactggaatctctcctgttattaaagtcatctttttggccaggcgcagtgcctcacacctgtaatcccagcactttgggaggccaagatgggcggatcacttggggtcaggagttcgagaccagcctggccaacatggtgaaaccctgtctctactaaaaatacaaaaattagccaggcaaggtagtgcatgctatagtcccagctactcttgaggctgaggcaggagaattgcttgaacccgggaggtggaggttgcagtgagccgagatcacactctactctctctactctactccagcctgggtgatagagtgaaatcctgtgtcaaaaaaaaagaaaaaacaaatcatcttttattctcttaaagaatgaatttttcatgggccatcaacttcttcagtcatttaagtatttgtttagagaatatttcagttagaaactcaggaaatggagacctgacctcaaagggccctttccagtcataaagtaattagaaataaaataaaaacaggttgaagtgataagctgataagaaaatccaatttgtttccaaaattgttcacttacagctgtttttctcatgaatatagctatagttgtcatcagcaaatcagtggcttggaattcgaaaggagtgaaaatatacatcctgggtctcttgaactcctagtgtttgccagagctaggcagcaggatcaaatggtcaatttcagcctggccctgaaatcaaaaccctctaacagtcacagaagttctgcagctagtcagttacttactgcccacacttcactcagcacaatccttaaagtcaccagagggagcccaaatttgcgacaaaccagaatgctttccttttagggcatagttgtccttctgattctacttttgccctctcctttccaagactaatttagaaacgaagggaagtaggctaagaaaatcctcacctttaatattaataagacttgtgcagtccccggatgatcagagcccagactacataggacttgaaagaaagaatgagactttgatatggaatatgaaaaagtaacaggtaggaggggtggagagaccaaactgagaggcctagggcccagcttctgcagctctgtcactgactggcccrgtgacgatcacgcctatttactaagcagggatgacctacgcttacctgtctacatttttatctgtgagatgaacgaaatgaaacctccaatggtttatttgccatgacaatttttaaaaatcagtaggaatgagggaattaggaattgagcccatgctataccttcttttcaaaagagatttcacatgtaccatctcatctgtattcctggagagatagtagcccattatgagtggctccaatttacagaaaaagtaactaaggcacagagtggtgatctacccaggacagcatggtctgtagaagaagcattggtctgtttaktgcattgaaatgtattccagagatattggtctgtaaagaccttcccagaatgtgtctagaaggttcaaccacctggtggaagacatagaacgccttgtcatgccttccccattccagcctggagttctctccatggtctcagcctgcttctatgaagcttagttttatagggagccttttaaccaagccaacctcagagtcccactggccaaggggatggtgggggaggcaaaggattctactggggcagtatgtaacccacatataagttccatccaaagcaacgcttccaaacctagctcaccaggacaggagaaaggttaccatcagggtactcttagctgagaactcatacctttcgggctttyattggcttgaggcatgagtgatcagcaragccccacatcacaatccctgtactcagatataaattatattagtgggcakggaatgtcaggaaacttaggttgtagaatctagatcaacaactgcttacygaggagctgggtgaattgtaaagaaagaaagaaacaagtgttgaatgactgtggcctcattaaacatttctgtggcctggcctgtgctttgggctttcccagagctgtttcatgcaatagctttgggcagggcacttctttggacttactccaactacacaaggaggaggaggatgtctatggttctttccaccccagacacagtatcagtcacagccccaccttaattccactactccaattctgttctgagggtatcacaggatgctgtggtgggttccccagccccacaaaatccttttctcctctaaaacaggagaacatctttccttcctttctgatcatccatcttgcagccagcaggactcccagccagaacattgtcaatttactcagggatccatgaggcaccttttggaagatgagaggggttgggtgaaaaaaggaagaggaagtggggtgctggtacttctggaaacaagccatttctcagcctgctctgtgaaggtcccccaaaccctacacagatctaggaagggaaactgcattccaagaatgcatgggggctagaaggacccgctggagcatggatcccacccacaggagataatattttgaaaagagcacacatttaaccagggaagaagagcccatgccctggcttaagagcatagctgtttcctcctccatctgcccccattttcccaggcctgactagagcaagtagttaagccaacccaaatccagaagtatgaataatgcgtgaagcmcaggaggacaggcagatggccttttcacctgcgcaggctatatagctctgtgcggaggggctgagagtccagcgcggcccctgtgcccctcagtaactgtgcaagaggaagtgggcctcccctgcgggggtatgaaatgtggggcgaggacttaggagttcaccgggaagtgccagccatcctggggcagacaccaagagctggagtgatttgtttwcccttttttcatgagttaatttgcttccagcagattccattagtgacctgacagaccaagggcctggaggaggtccctggaagagctgctgaatcagcagactaaaggggcgaccaggaaggccagacgtcttgcaccgagccctttgctcagagtttctatttgaagagcttagaataactatttgctaagctcttgtcaaggcagcacctctaaaccatgtatggagagaagacacacaaaccttgaccaccaaatgtgaatggccaatcagaagctgacacaatcagctgctgactgaggaaaaatgattttatgggggaaaagaattcccacatgaaataataagcaaaagttataaacttattaaaaagcttgttaaaaacttacttaaaaagcaaaagtttaaacatggttccatctgcaactaggaactggtcggggagggagggtttgaacttcctttgagtttcaattgataatccccgaagattaagaaaatagtgatactattactactgctgctgctattattacaaataataataactacaattaacatttatttggcacctagtacatgctaggaagtaggcaatragtttttttgtttgtttgtttgtttgtttttgagatggagtctcactctgtcaccaggttggagtgcaggggcgcaatctcggctcactgcaacctccgcctcctgggttcaagcaattctcctgcctcagcctcccgagcagctgggactacaggcacacgccaccatgcccagctaatttttttgtatttttagtagagacggcgtttcaccatgttggccaggatggtctcaatctcttgaccctgtgatccgcccacctcagcctctcaaagtgctgggattacaggcgtgagccaccacgcctggcctgcaaggagttcgttatgcatgatttcatttactccttgcaacatctctttgaggtagggaaactgtgtgggtgagaaaagtcacatagctgctaagtcatagaaaacgttcagagcaaaatcaaacccaggtgtaggccaggtgcagtggctcatgcctgtaatcccaggactttgggaggctcaggcaggcggattacttgaggccaggagttcaagactagcctgggcaacatggcgaaaccccatctctaccaaaaatatgaaacaaattagccaggtatggtggcatacacatgtggtcccatctactcaggaggctaaggtgggacgattgcttgagcctgggaggcggaggttgcagtgagccaatatcacaccactgcactccagcctgggtgacagagttaagactctatctcaaaaaaanaaaaaaaaacccaggtgtgtccaactccaggcttgtgcacttacccactctgctatatggctaaatcccacaggctacagagagagcagggaagtaggactcaggagaactgcctccagccccacaggcaccctgactagctgtgggatcttagcaagtgatttcaacttgtgggccatcgtattccatcagatgattgatgtcttagggaccccttcaattcaaaccacagttattggtggactgcctgagtgccaggcactaagatagggggtgggggaatgtataaacaaaactaaggcgtggtccttccctccaggagtttacagtctagccctgccttatgcaaaagccaaagagccttaggtgtcccttcaggtctaaaatactactcagagattccttttgaacatgcaaagtatttctgayagcattcatattcatcttctatttgttctgtgtggacatttgcatggagaggtatctgaaattatgttcgtccaatggatttggggtgataattttgctctcatctttttacttttatgtgttgcttgaatttttagtaacaaatatacatcatttctataaaaacaaaggcatttttaaaatactgctaaataacactatatatgggtgtatatgtatatgtatatatgcacacacatacctatatacacatatatatttaaacagtaactggatatttaataatactgtggaattattgttaactcagataagattgtgactaggtttccagaaagaatctttattttttgcagatacatactgaaataatttacagataaaatgatgtctgagatttatttcaaagtaatctctagtgtgagagggtaggagtaggctatagatgagacaacgctggctctgagttgcaagttgtggaagcaatttgggtgctaggtgatgggtataagagtgttcacgatactacataggtttgaaattttccatactatacagtaaaaaaggaactcctttcaaggccaacagggaagcaacatttccccaaagctaagctaagcacccagctggcagcatttctacctggggtttctaccacccttggcttcctctcttctttgactatctatcacagtttaacttcattggttctctgcagcttcctccccccccccnnnnacaccattcccccctaaccttctggaatcacgtgttgtatctatttgtacattccagtgcccaggccatccctcttcgaccttaccctggcccaggggacagagcgggtgggcctgagcaatgctcccacacacctccgctcaaagtcagctgtttgctgtagaggtagaacagcttgactactgggggcgagggtcacagttcactcattcccccagcaaatacggagccagatgctggggactcagcagtgaacaagaccaaattgctaccttcacagagttttcatgctagagaaggagccaactataaatgttatctcccatccctcccagatttagggccaggggtatattcaccaagacattcctgaatcacctgggatcttgtcccaaataatttaaacctgaaagacatgatctagtgccaagagctagaataccacccaactacccatcccaatccagttccccatttaactgacaaaaaaaanaaaaaacagaaatggtgtaagcccaccatgtaagtaaacataagtaaacagtggcagaggaaagggtacccagacttcactgtggcaggcccacctgggaccacattcagaatttttacaagcttwgctgcgatgttgaccaaagttctccccactttttttcatttgcttgaatttcacttttatttttattaacatcttttgttttgttttgttttgtttttgagacagggtctcaccctgttgcccaggctagaatgcagtggcacaatcatagctcactacaatgtccacctcccaggctcaagtgatcctcccacctcagcctcccaagtagctaggactacaggcacaagccaacatgcctgtcttattttgttttactttttgtagagacaatgtctcactatgttgccgaggctatgcttgaactcctatgctcaagcgatcctaccacctcagcctcccaaagtgctgggattatagtcatgagccaccacacccggccctttattaacatcttaaatttcgtgttataaggcttgttatacaaaatagtggtccactgcagcttaattctttttctttttctttttctttttttctgagaaagagtctcactctgtcgccaaggctggagtgcaatggcacaatcttggctcaccacaaacctccacctcctggkttcaagcaattctcctgcctcagcctcccgagtagctgagattacaggcgtgcaccaccatgcacagctaatttttgtatttttattagagatggggtttcaccatgttggccaggctggtctcgaactcctagcctcaggtaatccacccacctcagcctcccaaagtgctgggattacaggcatgagccaccacgcccggcagcttaattcttttaattgaagattgtgatatttacctacacatctctaaataacatgtttttaactgttgtttcttgatttttcagttttaggcttccccaagtaggaaagagtggatttaccctttttgtagcctgtgctttcttatctgttctcactatacacacacacacacacacacacacacacacacacacacacacagacacatacacacttcctttctctccatccccctatgctccatctgtctgcctgcctgcttactatctatcatctatctgtctgtctccttcctccctccctctctcgctcactctgtgtatgtatgtactggtgaatatatatttttatttctcaatgattaccgtttttattgctatgattatgtaarctctattcagaactgtgacatgtagtattctctagttacatttcctccactggataacttgcattcctggaattaataattgtcttatttaattcatttgcttagtattgtatgtactcaccrctaattcaracccctagctctccttaagttgtgtatattctctctcaatatgttgagtatgtttctcacccacttttgagggtgaatttggtcattttgctagcaaacatgattgtagcagttttaaaaaacaaaacttccctgccagagataacttatacaccttgctaatataaccagtgacctcctatgtgagtgcttgatcatggaaaacatttagccatgtttggctaatcctaacaaagactacatttggtgcacgagaacttccaaatcacctttcttagcaaaagaaagagagaaagaaaagaaagaaagagagagagaaagaagaaagagagaganagaaagaaagagaaagaaagaaagaaagaaagaaagaaagaaagaaagaaagaaagaaagaaagaaagaaagaaagaaggaaagaatttggaaaaacagcattttcaatttttcttactttatcacaataatggaaatggtgtcataaggttttaatgcattcatcaaaatacagcatgttctatattacttgtggatttaccattgttctaacaaaaaagtatgtattatatgctttcacccatagactgtaagctctaagaaggcaaaccgcttcagccctacttttctgaaatatcctcatcacctagcacaatgcctcccatgtaattagagctaataaacatttcttgaattgaatcccaatgtgctttaagaatgggagctcagtggcacacgayctgagttagttccctgtgcctttatagcaaccagtttgcatccaggtcccagtgaggcccactggacagttccctaaccccccctgcatgctatcaacaatgcacctgctcttggccatttccacctggaagttgaattggcctctcaagccttccagacgaagtggagcccacacacacctgctgccctcacagtcctcaccatcacaacaatccacygtctcatcttccacttgctcaggccaaatggatgcctctcttgttgtcacatcctactttcaattccatcttaatcccatcatctctaccttcaaaatgtactcagaatcagctacctctcaccacctttgctgttaccacgtggtccaagtcactgcctcctccatctactctcaactcagcagccagagtgatgctgtaaaaccttctggtaggtcccaactccaaggataagccaaagtgctcctattcctcccactccctctcactctgcaccagccacatggcttcccttgctgttcttcaaaacatcagccatgcctccacctctggacctttgcacctgctgttccctctgacttgaatcctcttctcctggatgaccctcaaatgttgcttctcagggagcttttcccccaacactcctggtcccaactccccattttagttacctccataaacttctcaccatctcacttctttacttagttacattatcatctgggtgcccccactagaatgcaagctccatgaaggcaaggattttgcccaatttgttcactgctctatgtctagcacccagaatagtgtgactaattcaacaataagtatttgttgaattaaattaatcctaggacacctggaaatatttttatatccccattagggaggaaaaattacagaatctccttccagatatattattccatttatatatatatatatatatatatatatatatatatatatatatgtgtgtgtatacatatatgtgtgtgtgtgtgtgtgtatatatatatgtgtgtgtgtgtgtgtgtgtgtgtgtgtgtgtatccccaggcctttctcaagcaaataaataagctctaatgaatttcaaaagacaaagaaatctcatttcattttaactttttctcacccttcccaagtcagggaccacctcctctcctccccggcccaaagctggaaactgtgtgctcagtggactcaggaggagttgcaggtgccaccgacctgaaggcaattaccacccacaagtttcaggggaagagaagattaccgagaaagggaagagaaattagcacatagatgagaaacacatgtttaaaaactccttctgaggtcatgagtaagctgattgaagctggcaccagagtgacaaattaatttcatgaccctcttgctttcattgggaaatgtaggattctaaaaaaaaaaaaaaaaaaagcaaccgatgtgtagaaaagggcacrtgtgtctgcccacatgcctatatagagtggtctggtaagaaaacaagctgttttccagtgcatttgttttgaatgtgcattgagccacctactgtgtgcccagcagaccagagatagctaaggctcaattcctttactcaaggaactccagcaggtgagagtggctagcatagacacagcccaccagaagtcactatgccactgtgcaaatgttctgctggcaggaattaagcactaggggcagctgttctgcctagaaagaagtctcgggccttgaagtgtgcatagacactggaagagctcatcaagtagagacctgggggtcggggaagaagtcctggcagagaaggtcacagaagcaaaggcctggaggtgggaagcccatggtgggatgtgattcaagctcagagtctgccaaaaggtggtggaatgggaggctgaaatgtgaatgttggtctagggagtctggcatcctcctctggtaagtgcgccctggtccctccagagagaattgatccctcccctcctttgcatcccacccacccccatacacactccccagggctcacacccagctcagggcctgggcacagggcatcacctgctccctcttcatggactgcttctcctcccgacaaatgcctctccctcccatccagcaggtctctgctcaatcaccaccttctcagtgaagccacctctcgcaccccctacaaggggacaaacccacacatacgtgtccctactttgctttattttctgccacagcatttacacttgtgtttytggtcagtgtcggcctcctccactggactgcgggctccatgaaggcagggactttgttttatcgactgccatatccccagcacctacagtgcttggcacttagtgagagctcaataaatatttgacaaattaataaaaaatgcctgtaacacttgagtgacttgggttgtttatttcttcccctcctacaagattgaaaatggatatgaaagcaaagcttgagctttcagctctctaccccggccctgtgcatggtgctgcccaggttggcactcagtaattagcggatggatggatggatggatggatggatggatggatggatggattctataatcwgtaggagccatcaaaagtataaagaaactgaactgtgcaatgcctttcctgtggggaaaagtggcctgatggggtagaagcactgcaggctgggaggtcaacgaggaagctcctgccagtgtccccacaagccacaatgtggcctgaatgggaggtgaacagagtaggggacagagtccagagacatacccaaggttaagccaatatgactcgggaccaagtgtaagtcaggacgaggggagggaggagccaaagatgatgctcagatttttgcttagatgacagtgaactccaaggggaataagcagctttaagggaagaagttcaattcattcaggatggaagtgtgagggaggacatcmaggcagtagaatggtcaggaggagagagggarattgagtcacgggtgctggctggagtcatgggaatccactcattcatttatctttttgagcccatgccaggtcccaggcatttactctgctagagactatggacgctgcagtgcccaagacaggcaaggtctgtgctctcatggaacttactttcggagaggaaaggcagacaaaggaaaagtgagcaaacagatccatagagataatttctgatattgtatgcactgtgaagaaaataaaaccaggccatgggagcatgatgcggggacaatattagataggttgggccaggaagggccttctgaagaagtggcttttgccacaatgaggtagagaatggggatgacgacgaagttcctgcttcttggcttcaattttcttgaacaaatctggggtgaaatcatcggctgagagcagagagatggaaagggttttcaggtaaatggaaaaacattggactattctctgccataggaagaaatggaaagggtgagaagagattatgatggtgcaccgaggacctcactgacggctgaaaccacaggggggtaaggagcccatcaatgcagggcgtgtgcaagtttcacaggtctcatatatcratgaagctttatgtccttgccactgaattgacatcagcactaggccgggtgcatcggctcatgcctgtaatcccagccctttgggaggcagaggcaggcagatcacttgaggtcaggagtttgagaccagcctggccaacatgatgaaaccccgtctctactaaaaacacaaaaattagctgggtgtggtgatgtgcacctgtaatcccagctacttgggaggctgaggcaggagaatcacttgaacccagaaggcggaggatgcagtgagccaagatcactccattgcactccagcctaggtgacagagcaagactcagtctcagaaaaaaaataaaaaagaaagcagcactaatgccctggcagcaatgtggaagctctgtctccactttgtatgagatgggcttgccggcttgttgatttgatggtaatttagtttgatgggctatgagggttttcattacttggttttaccaggcacattcccaccaccacctcttccacagactgaggtcacctcagtctgttcctgccacagcctccacgcacaagccatcctgcaaattaatcaccctcaacattcatcgtgccaaaccttaagtaactccccagcacctgcaggatcagtgccaaacttttcgcccaagtatttataatcaggtccttcgtgacctgtccagcttctctctcccagtgacctggctggtgttctcactgctcctttctgaacccaagcttattcgaatgcacaggctcaggtacccgcctctgctccatcgataccagccatggagtcttgggcaaatcttgggcaactccttggagttttctcatcgataaaaaagttaatatggctgggtgtggtggctcacgcctataatcccagcactttgggaggccgaggagggcggatcacctgaggttgggagtttgaaaccagcctgaccaacacgaagaaaccccatctctactaaaaatacaaaattagctgggcatggtggcacatgcctgtaatcccagctactcgggaggctgagacaggagaatcgcttgaacccaggaggtggatgttgcagtgagcgaagtttgcaccattgcactccagcctgggcaacaagagcgaaactccatccgactcgtgatccacccgactcggcctcccaaagtgctgggattataggagtgagccatcatgcctagcccactggtactcattttctaagggtattcttttctaaccrgaccacgaaatctccaggctacctcaagggtcttacaaggaggaagcaaaggcctaggtgcccaaatactggtatttcaacaggacggcttttatttttaataaaataatttttatagagatggggtctcactgtgttgtccgggttgttctcaaactcccgggctccaacaatcctcccacctcagtctcccaaagtgctgggattacaggtgtaacagctttttataggagttctgcctcctacagcttcatactggaaaatacgagcaaaaaatgttgagcacatctatgatgagtaagggagatgagttgcactgtatggagaacctgatcccaggcctggccccacctttttttaactgtgaggcctgaggactatcccaggccatccaggcctctggtgtcacgtctagatagtgaggaagaacccccttccatggtctctaaggtggttcctagatctattattccaagcactagctctcctatgagctgtactgttgaggggcagaggggtcaaaagaaccttctccctctctggccgatagatggttggggtactctgaaagcttctctgttccctctgcccattctcctctaaggtgtttcattcaatagacataaaaacaagagcatcacactgcaaagtctgaacaattgaagagatgccccgccctccatgactatcaaagttgggggatggatacttgggggttctttatactattctttctactgttgtataagcttgatatcttccacaataagtttgttttttgttttttgttttattgggagattctcactctgttacccaggctggagtgcagtggcacaatctcggctcactgcaacctctacctcccaggctcaagggatcctcccacctcggcctcctgtgtagctgggaccacaggtgtgtgtcaccatgcctggctatttttttgtatttttttctggagacggcatttcaccatgttgcccaggctgatcttgaactcctggactcaagcaatgtggctgcctcggcctcccaaagtgctggattactgagccaccacacccagccagaagaagtgagaataacagcaataaactcacctgattccaccctttcatgtactaactagatatggatcttttgagccctcaaaaaggtactgatctttttttaaaggaactacatctgaacatcgtaagattcaatgcctttttaaccttgcacattggagaaagaggtatgaaggaagaagggcaaagggtacctgggagtcagacrtctctctcctcccaccaactccatcactttgtaatgktctctactaggatgcccaagttcccagagccctagtctcctcaattgcatttttgaggggcctaaaggagaccaccttgcctcaaaagcacttgttccggttataaccactcccacacacatttaaagcatccctttgttgttgcatatgcagggctgggaggaacaatggtgctgaaaytttccaggacatgaaaatccgattgcatggcctcacccctagggattttgattcagtggctccagcggaggaggcccaggaatctacctttccatcagtcacacaggtgcccctcctgtaggtagtcctcagaggacaccttgagaaaaccaaaggaaaagcagagggaggcaaactgctcagtgctacctgggaggaaaacaatctacctatagcatggaaaacctccaaggagcaggcagggagtgtccatcagaatgacaggaaggagcgaggcagttaaagggaaagcaccatcatcaaagccttctccagctaataccttgtccttcctgcatatgctcctatctcatttttattttctaaattttacccagacaagcttccccaaaacccactcatcctgaccttcccgggctccatcactaaatctccccatggccaggggaacttttagaaagtgtactggatcaagtccctttcctaacttcaatccttccatggctgcttactgcccttaggataaagtacacagccctcaaacttctccatcaaggcccttcatgaccaggcctctcctgacctctcttaccatctcatccctctccagtgctgcagccacagtggccttccatgggtcccccaacatgcacaggaccttggcacatgctattccctctgctgggatcaaatgtttcctcttcaaggaaattttccctcaatgccctagaccagaaaaggtccccctactatactcttctatcttcctggactttccaacttaacactgatcccacatttacttacatatttgtgtgattatatgattaacatctgtcttcccaagtggaccataagcttcataaagatagggtctgtgttggtttggctcaccatcatgtacccagggtcacagtagctagtacattgtatgtgttcaataatacaacataaatgcccagtgcactgtggtctggggagacatggatgaagaaaaaaagtgagacgcatgcttgaaaaattcataatgcaaatgacaggccagtgtgagacggtgtgcttctcctggtcatggccactgaaaatcttctcgactgtcacacggatggcgtcactggatgccacaagatctcaggctcttcccagtaagagcatctctctgggactgtccccagaggacaatgagaaggtggcttacctcctggggaatgtggggacggaaaaagagggctgggagagagagagtgccaacctcctcaatccccttcttgttatctcctgaaaatgtagcttagtccctcactatcaggactcagagagagaggtggggaagagaaggtcacagacagaaacgatcttcctccctcctatctggagccacagaaacaggcatacccatgttatctttgagcttgcttttttttccctagagatgatggggggtagggtgagcaggaagattcagagcagtcagttcagaaaacagggtgtttttctgcttggttatcagacccatgcccattcaagggatgcaaaataggctgaagtttagattctctgactcggctattgagtcccatcaattacaacacatggaaaaaactttggacagttaaaaataacataggggcctggtgtttggaagatctggagtttggaatgccagcttgtcaagcacagatccctgcctaccaaaaagcatgtgctgggaactcacatacacaccaaccagcacaagaaggtcacagatgagcaaggtgcctgttacctaccaccctgacaacagtgtgtcaggccaacttggaggacaaactctcagtcctcagccactttggtctaaaggacttccaagccctcttctagctgtggaaagggcagagctcatccaggaaagaagtagtctccttccccttagaggaggtagccatgaatggaattgtgggctgagtccagtcaccttacagagacacttcacctctgtgtgctgtgtttctacatctgtgaacttcttgttctttctcagaaggacccaatatcagcaccaattaaatagtatgcaataagctgtgctcctggacaaagcatgccatagataaatctttcttgaagactctttaacacatttgttctatgagtaaaacaataaattgataaaaataataatgccatagatttctagaacttctttcttctaggaaaaccagtgcttctcctacttatcatttcatttttttaaagatgccagtgtaaggaaaatattggctagtgtgtctcctcattttacagatggaaaaacagggtcactgcaaacacccattaaaagggtaacgaggctgggcacagtggctcatgcctataatcccagcactttgggaggctgaggcaggtggatggcttgaggccaggagtccaggaccagcctgggcaacatggcaaaaccctgtctctatttgtattagtccactttcatgctgctgataaagacatacccaagactgggaagaaaaagaggtttaattggacttaaagncctcagaatcatggcaggaggtgaaaggcacttcttacatggtggcagcaagagaaaatgaggaagaagcagaagcagaaaccccagataaacccgtcagatcttgtaagacttactcactatcacgagaatagcccaggaaagaccagcccccatgattcgattacctccctctgggtacctcccacaacatgtgggaattctgggagatacaattcaagttgagatttacgtggggacacagccaaaccatatcattctgcccttggcccttccaaatatcatgtcctcacatttcaaaaccaatcatgccttcccaaaagtcccccaaagtcttaattcatttcagcattaacccaaaagtccacagtccaaagtctcatctgagacaaggcaagtcccttctgcctatattctataaagtcaaaagcaagctagttacttcctaggtatgcaattccaagtgggagaaattggccacaacaaagggtttacagsgcccaggtaggtctgaaatccagcaaggcagtcaaacattaaagcttcaaaataatctcctttgactccaggtctcacatccaggtcacgctgatgcaagagctgggtccccatggtcttgggcagctccgcccctgcaaacacccattaaaatggtaatgaggctgggcacagtggctcatgcctgtaatcccagcactttgggagggtgaggcaggccctacctccactttgcagggtacagcctccctcctgcstactttcacagtctggcattgartctctgcagcttttccaggcacatggtgcaagctgctagtggatctaccattctggaatctggaggatggtggccctcttctcacagctccactaggcagtgccccagtagggactctgtatggaggctccaaccccacatttcccttctgcactgccctagcagaggttctccctgagggccccgcccctgcagcaaacttttgccagggcatccaggcgtttccatacatcttctgaaatctagaaggaaatcccaaacctcagttctagatacctgtgcaccctcaggctcaacaccacatagaagctgccaacgcttggggcttccaccctctgaagtcacagcccgagctatatgttggcccctttcagccacagatggcccctggagcatctgggacacagggcaccaagtccctaggctgcacacagcatggagaccctgggcacccacgaaacttcttttacctcctgggcctccaggcctgtgatgggaggggctgccgtgaaggtctctgacatggcctggagacattttccccagggtcttgaggattaacattaggatacttgctacttatgcaaatttctgcagccgacttgaatttctccccagaaaataggtttttcttttctatcacctagtcaggctgcaaattttccaaacttttatgctctgcttcccttataaaactgaatgcctttaacagcacccaagtcacatcttgaatgctttgctgcttagaaatttcttccaccaagctaccaatgactttcttcacggaattggaaaaaactactttaaagttcatatggaaccaaaaaagagcccgcattgccaaggcaatcctaagccaaaagaacaaagctggaggcatcatgctacctgacttcaaactatactacaaggctacagtaaccaaaacagcatggtactggtaccaaaacagagatatagaccaatggaacagaacagaggcctcagaaataatgccgcatatctacaactatctgatctttgacaaacctgacaaaaacaagcaatggggaaaggattccctatttaataaatggtgctgggaaaactggctagccatatggagaaaaatgaaactggagcccttccttacaccttatactaaaattaattcaagatggattaaagatttaaatgttagacctaaaaccataaaaaccctagaagaaaacctaggcaataccattcaggacataggcataggcaaggacttcatgtctaaaacaccaaaagcaatggcaacaaaagccaaaattgacaaatgggatctaaataaactaaagagcttctgcacagcaaaagaaactaccatcagagtgaacaggcaacctacagaatgggagaaaatttttgcaatctactcatctgacaaagggctaatatccagaatctacaatgaactcaaacaaatttacaagaaaaaaacaaacaaccccatcaacaagtgggcraaggatataaacagacacttctcaaaagaagatatttatgcagccaaaagacacatgaaacaatgctcatcatcactggccatcagagaaatgcaaatcaaaaccacaatgagataccatctcacaccagttagaawggtgatcattaaaaagtcaggaaacaacaggtgctggagaggatgtggagaaataggaacattttctcactgttggtgggactgtaaactagttcaaccattgtggaagtcagtgtggcgattcctcagggatctagaactagaaataccatttgacccagccatcccattactgggtatatacccaaagggttataaatcatgctgctataaagacacacgcacatgtatgtttattgcggcactattcacaatagcaaagacttggaaccaacccaaatgtccaacaatgatagactggattaagaaaatgtggcacatatacaccatggaatactatgtagccattaaaaatgatgagttcatgtcccttgtagggacatggatgaagctggaaaccatcattctcagcaaactatcacaaggacaaaaaaccaaacaccacatgttctcactcataggtgggaactgaacaatgagaacacatggacacaggacggggaacatcacacaccggggcctgttgtggggtggggggaaggggagggatagcattaggagatatacctaatgttaaatgacgagttaatgggtgcagcacaccaacatggcacatgtatatatatgtaacaaacctgcatgttgtgcacatgtaccctaaaacttaaagtatgataaaaaaaaaaagaatctagaaaaagaagtacaaattcaacctaaaacaagcaggagataggaagcattataaagattaaagcagaaatcaataagaaaaaaaaaaaaagaaatttcttccaccaagccaggtggagtggctcacacctataatcccagcactttgggaggccaagatgggcagatcacggggtcaggagttcaagaccagcctggccaacatagtgaaaccccgtctctattaaaaatacaaaaaaattagccaggcatggtgatgcacacctatagtcccagctactcgaaaggctaaggcaggagaatcacttgaacccaggaggcagaggttgtggtgagccaagatcctgacactgcactccagcctaggcaacagagcaagactccgtctccaaaaaaaaaaaagaaaaagaaagaaatttattccaccagataacctaaatcatctctctcaagttcaaagtttcacgaatctctaggggagtctctaggggagggggcaaaatgccrccagtctcttcgctaaaacataacaagagtcacctttgctccagttctctacaagttcctcatctccatctgagacaacctcagcctggattttattatccatatcgctattagcatttgggcaaagccattcaacaagtctctaggaagttccaaactttcccacattttcccgtctgcttctgagcctttcaaactgttccaatctctgcctgttgcccagttccaaagtcacttccacattttcgggtatcttttcagcaatgccccactctattggtaccaattactgtattagtccattttcacacagctgataaagacatacctgagactgggaagaaaaagagttttaattggacttacagttccacgtggctggggaggcctcggaatcatggcaggaagtgaaagacacttcttayatggcagcagcaagagaaaatgaggaagaagcaaaagctgaaacccctgataaacccaccagatcttgtgagacttattcactatcacaaaaatagcatgggaaagactggcctccatgattcaattacctccccatgggtctctcccacaacacatgggaattctgggagatcaatgcaagttgagatttgggtgaggacacagccaaaccwtatcactactaaaaatacaaaaattaactgggtgtggtggtgcacacctgtggtcccagccacttgggaagctggggtgggaggattgcttgagcctgggaggtcgaggctgcagtgagccatgattgcgccactgcattccagcctgggcaacagggcaagaccctgtctcaaaaaaaggatattgtgtgccgactctactaagcactttacatacattaacttgcttaattcttccaacaaccccataaagacaaaaactattagtcctactttacatatgaggaaactaaggcatagatgttaggaatcctacccaaggccatagggcttgaacttgaacccaaactctctggctccagaggctgcacccaagccgtgggtcacacagcaactgctcccagcctcctgctccccaccatggagtgtctgagcttacaaagtgtgcaaagcttacaaagtatgcaaggaacgaaccctaaggacttgtgtaacccccagcctccccgtgaaaactaggcccagggcatttctggaaggaagtggccagcacrcaggtagacagctgcagcagtggcaggggtgtctgggtgggaaccaggcagcactaccatcagaataaaccaccccgatccccctaggaggaaacccactgtcttagagacctgcagcctcactctcccctatttgaatcatgaaactaatcctcagggcaccatgctttaagctacacaggttggcatttacattttcctccttggattggatttatatattttatttacatcatttattggttgttgttgaagaagaagaagaagaggaggaggaggaagagaaggaggagaaggaggattaaagtacagaaagggaagaagtcatttgggtccactgctcaggtgggctctgcccacaagtctgcccagcgttgcaaatcggcccttgcagctggacagagctggcctgtagctgacaggattgatggctcacaccagtgtgggccccacagggtgtctccctcaccccacccctctgggtggtcccctggaaagtatccaaaatgcataacaaatgaaaccaaggacggggtccagttcaaccccttagtgagagggaagactggagacagacaatcccccttgctggaggacacaggatgaccaccccaccctccccctggagcctctcttttggacgatgaggagtatgagtctccccaaacagtgactgccaaaccgggactctgctcagaccaacctggcccaggcttatttctcatttttcccttctgttcacrgacaccccccacctactcccaaccagccaaacagatctgtgtgctctcctccatgcagtccttcccatctggccttccttccctcagaaaggaagggtgtccccaaaggaatcgctcaaacgcctcacgtctttgttcacttccctttggtgactaaagttccccagcctcaccctcccgagcctaaccagaccccactgtccttctgaactcagctcctctctgaagcatcctctgtcatcccagccacaggaactgctgtctgtcttccaatttcaaggacccctggtggcctaggctgatcgtttagcgcagctattcaccacctggaacctcaygtgaagcagcttctctcaggaatgcatgctctgctgcctgtaagctttgtccttttcctccttccctctccccactcccatattcatgagattgagtgggccctccttggggacaaagccagaatactctttccttcytttgtgccccttcagtgctttttgatcaaggtgcaattcatggaggaaaggagaaagacgtaaatagtgaatgaaggaggggacagggatcagaaggaaacctaggctggaggtgcaaactcagggctctgagggccttggggcagcttagctcttagtcaagaaatgaaataagcagcagaaagcaaaagaaaaaggaaaggctttccagcgggctttttcttcccaaggatttgaaaagctacagtagagcctggaggagagtgggctgtccagggctgccggctctgagttttggagagaggtggagatgctgtggagcttttatactatccagaccagttcctctgggcagcaaaggaggcacacacccaggacaatgttgggcaataaagattattccatcatttgggagcaggagcgccttttgttctgcatttctcagggaatcaacacattccaagcaggaaagggatgagaacaaatgaccagcaggatggggactgatagtattgggtcctcttcattcagcagattataaaataataaaacaagcatcctactgctgcaaggatagcaagagctagcaaggtctcaaaaaggtttcagaattcagactcacaagccaggcagcctccatctctcctctgacactcgctgggatcttcagcccctgagatgacaaacaatgtccccctggtgtgctctggactgaggaactatgagaacttcctaaatctcataaaactatagattagcgttcatccctgctaccctgtgcataagtgacctaaaattgaatggtccgaacctgtttcccatcccccagagacatgtgtaattagataaaatgaggacagaatatgtataagtatctgttatactcagatggctgcccagaaagaaaatgagtgccaggaaccggacagccctgtgtcaccctctgtcctgaactgggattgagggagacttacctttgtgagtaggttgctagtgcaatatgacctctctgagttaacgaatatttttctacaattcggctcctgcagcccatatttggcacaccatcagcattttctctggctttccatgttgaaggatgtctttcagaccaggatctgaactgaaacttgaccctgggagtccgtgtccaccttgggacttcctcttcctccttcaggcctctttctggtggtaccctcttccaaaaagcccccaacacagaattatttggaggacatacaaaagttayaatgatacgctggtatctctatctctctcaatacaagagagaaaggccctcacttgagccctaggccatcctttttgaaggatgaatgaagtgatctgctatacttggttgggacacagagtcgtagggaaaatcattctctctctaggcattgatactgtgaaagtatacaaaaggcattctctcaaagaagatgtatccaaaaacagtgactggactaaagctccatggaacagacagcagatgttcaccagaacccagccttgggtttaaaccattacagtgctttgcatcttctggtcttctctatcttaaaaactcaaaagaaaaaagartcctccagtataaataaagctaaaggaaatcccacacacagctaagcatagaggaggcactgaataaaaatgaagttgatttatcagtggctatccataagccagaggttacttactcccctgaaagaaagcaaagcaaaaaggtttgtctttatttctcaagaccaaagggagaaagccaagctttttaaagtgaccaagaaacaagaggctagaatgagcgaggctgccacatgtcataaatgcacatcctacatgcaagcaaggccaaacctgcatctgtttcccaactcctgaaactgaaggctctttggggaggaattctgcctttttcagattcctgccgtgaaggcagagaatgagaaacatgtcaactttctagagtgctaaaagcaaacttgggcagcagagcagggtatctgcctgcaggcttcgctcactcaactattccccacacgtttcctacgtgcctgctaggctaggtccttgggacagaaaggcacatgtggccaggcttggtggctcatgcctgtaatcccagcactttgggaggccgaggcgggtggatcactggaagtcaggagtttgagaccagcctggccaacatggtgaaacgccatctctactaaaaatacaaaattagctgggtatggtggtgtgcacctattgtcccagctactcaggaggccgagataggagaatcgcttgaacccaggaggtggaggttgcagtgagccgcaccactgcactccagcctgggtgagacagagagagattccatctccaaaaaaaaaaaaraaagaaaagaaaggcatatgtggctactgtccctgccttccacgcccttactgctaactaactcctgtcaattatttcagtgactgagagagaagagtatgttcagctctgcatggcccagggcaggtgtggccagttctacctgagggtcagcaagggctccaccagggagagggaccacttaaaccatccagaagatgacagatgtgcatcaagtgcgcccagggacagggtggaggtggaggacaatcaaaccgcctgcccagaggaaaccgcctgcccagaggagccacaagcagtttgctcagacaccaggggaatgtgtgacaagagtcgtctctctgggcagggacacagagcatcccctcagactaacaagttcacacacgtctctcacactgaggttcttaccctagagcccatgggcctccagggcatccagagatgggctcttccaggtctgtgaaccccataaaaccataggcagatgttcacatctatatgcgtgttttccggggagatgatccacaactttcataggattcttgaaagggcctgtgattgccaaagaaaggtgaaaaagaaacacccatcaagactgagtagcctgcacactagactgtggtatagaatccagtttctccctgtctgtctcctgcatatggctcagtaacagacatagtaagttttcagaactagcagaactaaagggatgagaagagcattccagtataagcagatggaaagaaattaccattggcatcaccaaaacaaatacctgtgtgtactgactgtgtgccaggctctgggctagactttaaaaaccagtatctctttccataaagccacatggaagagtgtcttctcagcctcctgttcctggagccaatattgcatattggagtccctaaatgtggattcaagtcacccagagcaattcactgcaatcgccagatcaggctcaaactttagttggcagttgcctagcaacgagtaaccctgaagacacatcaccaaacccagatgccaaaaagggcattttgtggacaagctagttctgaaaccagcccctcataagtctatttgtcaggcctccctggggctgttggggtaaggagtagactttgcagccaaaggtaggctgagaggagaaagatagaaaggcattgttttttgttttttcagacacggtctcactctgttgcccaggctggagtgcagtgacacaaacacggctcactgcagcctcaacctcttgggctcgggtgatcctcccaccttagcctcccaaataactgtgactaaaggcgcgtgccaccacacccaactagtttttctatgggattttgccctgttgcccaggctggctcgaactcctgggctcaagcgacctgcccacctaggcctccaaaagtgctgggattacaagtatgagccattgcacccagctggaaagtgttctgctggttgtatgttttcccacctctagggaataggcatgagaaggggaactgagggttaaaggagaaggcagcctccagtggagaaggcagcctccagtagagaaggcaattggtgcctcttcacttcctctttcagattgtacctatggttactcttccaagaagttgcttaacagatgccacccacacctaaagacgcataaagcagcaggaagacttgactgaacgtacatccagtccttccctaaagccatcatcctcctgcagctccaaaaaccccactgaactatggaaggctggggtgagcaggatgatagacctcaaactacttctaacagtgaaactggggaagcagtttttaaccaactctccaaggcaactcactyccttacagaggcatgaaagaggcaaagagatctcattctctaaaattcagagctgttgttgttgttgttgttgttgttgttgttgttgttgttgctgttgttgttgtttttaacacaaagctcagaaactccttaagctaagaggcaggtgagactgggtttcccaagacaaagtttccagtccaaaccatcacataaggccaacactgggtattctccctgtgtcgatagtgggaagcctgggaagacggccttcttcggaatccaccgtcccttcccttgaaaggtcttgggggtaggaggaaaaggggcaaataaatatatcagtctggaggtgattcaggaagaacaaatgcggatgtcaaacaacaaataaggcagatataaatccaaataaaatattaaaatcattaaagggctgctgctccctgaagattgggaaaaatgaagagagttaattaaaagcaatctccatgcactgctgagccggccagccctgataaatcaacagctggggctgctgtggagggcaggcaaggggcttcaggagggggtgggccagctgggggaagggggtctgccactgagatggctgtgatggcaaattgaacacagtgacttaagtttcatgttttattaaatattttatgaccactgaataaagttattctttggagagggagaaaatgatgagctgggtaagtgaagggggggaagataaggatgaagaggtattgtctgattcaaaacayacttaggactgtgacgttggaacctctgatatcgcccccaaaggccgaagctttgggttttttttctttctacttgatctgcaaaggtagctgtgtcttcgtcttctaaaatctctctacaaaacttgggttatgtttatctgagggaccagggaaggcagtgcagagtcagggaaagtaatgaagaggaagaaaagacagaaaagatcctcaaaattgtcattgctgatcaaagccagacttttaacacaaaactaaaaggtcagcagaaatggtgggaactcttttttctttctttacttctttccttctcccttttttctgcagctagtttttgtgtgtaaaatgaaaaagagctccaaattttggggctcaatctaagtcaaaagccagctatttcagaagtgttagaagaacaggcccttctctattctaaggggaaaccctccagttcttccttgatgaaaatataatcaagagaaatgattgggggaaagtgtttttttctcctccatagaactgggattggaaggggagtgtgtgcatggggaaacataaggaattatgcatttggatatgcattttaattaggtggacagaagcagccgcctgttaatttttcttgcttgtttccacttagcattcatcacaggcagaactaccatagagcgctcccacgataatagatggttctgcattggctaagtcctcagggaaaataattagcaggagagaatatattctctcccctcccactgccccatccaccctgccctccccctatcaccagcaccgcgttgccgcccstctccccactcccctcacctatagtggttttcctaggaaaagccgagggcagcagtcagcctcctggtttgctagcacttactttgccctgccaaaaaacaaggrtctaggagaagaaacagacagatcagaagtctctattggagtggaagctcctcgatgtagggagggagtcaggtggctgtgctgattagttctcaggggcaggcaggcaatccatgttggttgtgggatgaaggaactccaaagaggatgagagagttctcgttgtgctcaactggcagccaaagatgtatcgagagttgctggttgaggacagcaggagtagggatgatgttttttgcttcatttgctcttgtaaaggaaagttgcagggccaagtaagtgcagtggttttcacctgcaatcccagcattttgggaagctgaggtaagaggatcacttgaggccagaagttcaagaccagcctgggcagcacagtgagacccccatctctataaaaaaattaaaaattaagtgtggcagtacgcacctgtagtcccagctacttgggaagctgaggtgggagatcacttgagtcaaggagtttgaggccacagtgagctgtgatggcaccactgcactccagcctgggtgacagagtgatcgcaytactgcactccagcctgggtgagagtgagaccctatctccaaaaaatatatgagaaaagaaaataaagaaagttgtagctttgcagcaagactgaatctgaaccacttccaaggctggcaaccaagacatgyatgtaactctgagatctgaccccaccgcaatgctctctggtctacttttctataaagaatctggcctggcatggtggcttacgcctgtaatcycagcacgtggggaggcccaggtgggcagatcacttgaggtcaggagatcgagaccagcctggccaacatgataaaacccgatctctactgaaaatacaaaaattagctgggtgtggtggcatgtgcctttaatatcagctactcctgtgtctgaagtacaagatcacttgaacgtgggaggcagaggttgcagtgagccaagatcacgccactgcactccagcctaggcgacagagtgagactctgtctcaaaaaaaaaaaaaaaagaaaaagaaaaagaatccattcttgccactgacctccaatgccaacagctcactctccttattcacaagcagatctaagcccctgccccgcctccacttcttctctctccctcagtcatctcagttgaaggaggagccagagaccaggcaaggaccaaaggcccaagttcccagaagagcaccccactctaccaaccgcgcttctgcttcctctggtttggtgggtgaactcaggtcagggctatgaccggaaatgaaatgagggtttcccctgagctcacattctcacttatttcaaacccagacaataggaaaatcccactgagatcccagggctatttacacagcctggatgagtagaccttgcatttcctgagaaacaatgattagatgtgatgggtaatgccagaaacatttatttttgttttaatatttaaaataatgtttaatatagtaggtattattgactgcctgaggaggccatgatcagctacaggaaacttttagttctcatagtaacacctcacatttgcactttccaccttctgaaatgtttccacatccattatttcatgtgggccgctgcggggaagccaggctggaggaaggggaagggaggagaagggagacacaagctctcctggctgtttggaaggacaggcctgacttgctaactcctgccccccaagctatcctgtcatcaccgtgcttccacccacctcctgttgtcagacatcacatctccatccacctaggaagccttcactccaagcctcaccaggtaactgctagtgctacagcccctggaactgcctcaaacccaaaccctgacccccacgaggagtccctgccctcaaaggaagggggatataggctgggcacggtggctcacgcctgtaatcccagcactttgggaggccgaggcgggcggatcacgaggtcaggagatcgagaccgtcctggctaacacggtgaaaccccgtctctactaaaaatactatatatatatatatatatatatatatatattagccgggcgtaaggcgggcgcctgcagtcccagctactcgggaggctgagcccggggaatggggaatggcgtgaacccgggaggtggagcttgcagtgagccgagatcgcgacactgcactccagcctgggcgacagagcgagactccgtctcaaaaaaaaaaaacaggaagggggatatgaggggaaggcaatccctgtggctggggatgggagaattgagtctctgggttcctagttcccagtgtgtttatcccagaacgcaatggactaccaatagagggagaggcagagaggttgaattctgtaatactattaggtttgggtttttttgtttgtttagtttataaggtggagaatgcctatattatctagaaatgtagccgctaattttttgggtttgtttgtttgtttgtttgtttgtttgtttgtttgttttttgagataaggtcttgctctgtcacccaggctggagtacatggagtacagtagcgtgatcacagctcactgcagcctcaacctcccgggctcaagccatcttcctgccttagcctcccgagtagctaggaccacaggtgtacaccaccacacccggcttttttttttattttttgtagcgacagggtctcatgatatgtccaggctggtcttgaatgcctgagctcaagggatcctcctgcctcagcctcccaaagtgctaagattacaggcatgagcctagcytagtccctagattttacagtccaaaaatgaaggagacctaggcatagtgaaaacccaaaagaaatgaaaatggggactcaaaaacagccaaaaggtgaaacaacccaaatgcccatcggcagttaaacaggtaaacaaaaagtgggctatccatacaatggccatagaaaggaatcaagttctgactatgctacaacatggatgaacaaacattgaagacattatgctaagtgaaataagccagacacagaagaacaaatattgtatgtttcccctgatatggggtgctaagaatgcagaatggtggttcccagggatggtaggaagcaggggatggaaaagtattgtttartgcatacaaagtttctctccgggatgatgaaaagggtctgggcagctgggcacggtggctcatgcctataatcccagcactttgggaagctgaggcgggtggatcatctgaggtcaggagttcgagacgagcctggccaacatggtgaaatgctgtctctactaaaaatacaaaaattagccaggtgtaatggcgcatgcctacagtcccagctactcgggagactgagacaagagaatcacttgaacctgggaggcggaggttgcagtgagccaagatcgcgtcactgcactccagcctgggtgacagagcgagactccatctaaaaaaagaaagaaagaaaagggtctggaaactgatggtggtgatggttgcacaaggtgggaggatcccttggggccatgatttcaagaccagtctgagcaacatagcaagacctccatctctactaaagattagaaataaatgtacttaatgccactgaaatgcacactttaaaatggctaaaatggtacactgtrtgttatgtatattttagcacaataaagaaaaattgagggaatgcctctctctgctggaggtcagggtgaccattttgttttctctttaaagtctcagaatttacacaccagctcctgtgtagactctgatgagttctgcaacctcctcccccttctctttatgcttgcaaaaaaactgccatggaagctttccaccaaagaaaagcctgataataatgtccccactgaaatctgagatgttctggagacatgtcactgaaggggaggcatgaagtccagtctagtcttggctaatacccactcaggtaggggctagttccacacaactgctgggcacctccatttcctcagcagtaacacaggtatgctagaggaagctcagtgagacatcagtacaggtccacttacttcagctcactaaacatccaggtatctgtggctgcccaaattaaaataaaataagcactttattttcagattaattgggataggtgccatggtagaggagaaggccagagagatcatggacaaataaagtccagaccggaggactggctggaaaattggttacccttctgcctccaaacacacacacacacacacacacacacacacacacacacacacacaaaaggaagcaaaatacagatgttctcagtgattccagtcttttaaccaccaaaaactgagtgcttatccacgtcaaaataggccaattggtcttcaagttcctcattctcatcagcttctggatgggatgctagtgagaagaaaatcactgaaaaggaagagccagaggaaaagcccacattctaaatggcccaccacctggtcctcagcctcagaccttgagaagggataggaagttccacccagcttagaaccccaagaagggagcaccatgtagcaagactgaatcagagaataagaaactgtggaagtctccagtcttaaatgttctctttagagccacactttaaaaataagaaaaaatcagaactctggcccctagctgtcctctctgtcctaatccaccataataagagccagaaagttgttggcttgaaaggaatttggggaatcaaagtacatcaccatcataaagacaaggaatatgcggctcnaagttctgtgtcccagatcacaagctagttgcctgtagctctggaagcggagctcaaggcttgggattcctctcccagagctttttctcctccattactctgaagtcactaaggctacaaaaaatcagccactggtgagaaatgaacatggaagaggaaaagaggttgagacgggtttcatcaatagcaggtgaaagtgtgaggatgggaaaaactttctggtggagcttccaagtgcagatcattcaaacagcagattttcaaggtgaataacaacaactaaaaaaaaaccttttatcagcaacctgagatgatcacagtccccagattcagagagggaggagagggtgcaaagkggggattagacatgtgccagcattgttccgcaggctcagaactgaggcctggctggtgaggactcaatgcgggctatttgaaccccattattaggagctctgaacctaatcctctcacccctccctgcttccacacattgcccctaaattgtaacctcttcagggattctctcccttcccttgccactgcctgccacactaatattcacaaacacacagcctagaaattctccagtctgctcctcttccctctgccccaccaacacctcctaaccactgcttttaaaactctaatgcaaatcacaggcttcaaaaaccttccctcagtgacagttttacgatgctagctccattcatccatatggtttgacagacygtgaaacaccagtaaccggaccaataagaaaaacaaattacaaaaacactrcaacacctcatctctccccagtcactcaaacaactagaaaactttggaatttgcaatggatcacaatatcagtctctcttgcagttcaacaacaatctttgcagagttccataccacacagtggttttacccactcctccatcctccccctacccaaggccactctccatctttccttgttaactaccttcatatttaaagactatttaaaattagggccatgcttacaaattcccctgttgggtcgtagctgggcaaaaaatatttcagtggttgtgggatttttttggccagaggtttgcaacatttggctacatttctgttttctagtgactttcaaaacactcaaaaaccacaaaagttactttgcagaggttgggataataaacaggcctggattctggtgcctctttatgacccagcccccatcgccactactgtcagcatagctgccttagaaaactgaaacatcagcctcagtttccattctttttctggtgcatgatcaaaacaaaacatgctgaccatgacattttattttttgcattgatctgaacagatggctctgaaacagctttagacattatggtctttctcagatgtatccaaattccagctacctgcatgattccaaaaagaggaggatgagaggtctccaactcagctgtctctgaattcaagcccaccttatgtgactaagcagctcccattcaactggcagtcttcaatgtctcccgggaggcctgcagaccaggctattttcagaggtttaccctgtgacaatgcctccacttgggttctcgcagacattaatctccatcataggtgtctcatcaaaagcagacatttacccattgaaaaataatgtgtgctaatgaggtttggagaatttagggcttttttatagtggcaaccagaagcagatggagaacaggttcttgggaatctgttggcttacaacgtccgagggtcctttttcataagaagctaaaacaatgtccataaaaggcagcaagttcacaaagtcccggcctcaatgctgtctacttagtacctacccacatccccccaacctcgacagaaagagctaagaggagattagaaccaggaatgtgacccccaccmcttcccctctgatatctaaactgagtgccacagcaagagtgaggtctggcttctaactttcacatgcacaaaaccactttagattagaatacactaatacaggtcatagaatgcacaaagagatctagatttgacgttcatctacacacatgacctgctgtttgacttggctaagtaagtttattttcttctcccagagtagtgttcttaacaacaaaacagggacataaacacatacctccaagcaaggttaactccttacaaaagaaagtttcaatacaatcacgtatatgtgtgtgttcacagttataagcatgacaaaatagtttatgggtctctttataaataattacttaaggtaaagccctgttggttcatatggaatttaataataataatttttttctaagtaggcaattataataatagacatatatgtgtataatcaagtctggcagaaggtggcagacattctcagttaaatgcataccaaccaggattttgataatacaagagtaagttgtttaaagtactgattgcagatttgggggaaggtggtttatctgaactagaatattaagattcaaatttatattaaaagcattatgtggccagacatcgtggctcactcctataatcccagcactttgggaggccaaggcaggcagatcacttgaggccacgagtttgagaccagctggccaagatggagaaaccccgtctccactaaaaaacacaaaaattagccaggtgtagtggtgcgcgcctgtaatcccagctactctggaggctaaggcacaagaatcacttgaacccaggaggcagaggttgcagtgagccaagatcctgctgctgcactccagcctgggcaacagagcaacaccctgtctcaaaaaataatrataataataataataataatagcattatgtttcccaggtatgcasaaatcaaccagaacgtgactaatctacatgcaggcctttatcaaatccatatttatgttacctgcatgtgtttacttcactacctgggccttatctcgcttgtatatgtaagaaatgagggtaactctcatacatctttgctcagacaatgtagctgctaaattaaataatatgtaatacacatttacacatcatacatgtccaccagtgcttttgaattctatttgtccagatgtgactgcttggttgtgggggccacctgccgtgtcccctttgtgatctgatcagtgcaggcggctcctatttctgcctctaacaccctgttgggcagtaataagatgttaaaggcgacaacagagagagaagctgggctgtcagcttcagagaggaagggggtgaagggtacaacaaggaagaaaaagaaagggagttgaggggagatcaaagacaggcaggaagaaagccaaattgctaagagaggagatgtggcttcaggagcttgggaccctaaggaaaaccccaaagcaatgagattcaaaattgtgccatcccatcaccccagctaattgaattattgaatgtcccacgtggaaaaagctagtacagtgaaaaatagcccatactcagcgtaggcagagccctgcataggtgctgctggaaatctgagcttgtttcttcccaacacattaactaccaccactttatccccccatcctgaggaaacctttgtgtgaccattttctgtaggagacgtccgtggtgttggcttttttttttttggagggaagagagagactcagaacgcacacagagaaaatgctaatgtcgttcagctctgtttcattgtcaggagggacacatgaggataaaaacatagctctccaaaccattctccccgctacccctcctccctgcaccaccaccatcccttcggctggatgtgtctctgcactttgttctaatttatcccatgcataatttattcacgtgtgtattgtttcctgatcagcaacttttaaaaacaaatgaaatatataagatgttttattaaacaagttatttttaaaaaaataaaggcagatggtgtccctctcccaataacaacgtgtgtgctcctgcgttaggagttgtcaaaaactgtccagggtgtgagaggctgggctggtcagtggtattgtttatacccctttactcacagggaaagggtctgggaagcagaaaggaatagctaattataaatgaccaagcaactcccacctagaaaaagcaagcaggggcgttgtgtgtatgctagtgtctgcatgtgggtggcaacacaattacaaatacatcacgttgcaactgtttctaattatacaaagtacaattcagaactaattccactaaccggccagaattccgccaccttctttcccgcgtctgtcccttcccccacccttaaccccaccctacacagactccctccccaaacacgcaccctactgtgatccaaaaaaccctggagcgagtmggggaacacaagcttagagatactgcgcccgcccgcgcgaaagcgggctcccgggtaactagggtacggctttcccaggaggaaacaaacctggtgcacatgtgaaataggttctctaacttgagtttaccaggtggcatcagcccggttatgtgatttcggctggaaatggggaaactgmaaatcagttgtgggttcggtagaaacagcatcagcggtgttgcagcgaaagcaaccggcagcgaggatgcggcgaagttacgcccatttattctgccataaaacattttctttcttgggtgaaacgctgtggcgttcaagcgcagtgtatccgagcttccgagccagaactgaagccaggagctcctatctgatcagcctcagcttccaacgtcctcttaacggcagctttcatataaatatatttgaaacctggggccttcctacccctttccctatttctgatgggcgacgagctggcgcaaacacgtccgattctccctgtgcattcctttgcgttaggaaccccctaccgtccccgggagcgaacctggttttcaactccaggagtggccaggggtgaagacgagaatgcgctgaattaaaagaaccagggtcgacagcggccacgcaccagggagaattcggcatgaaccgccccccacccgacctgcacctccctctgccacttcgcctgcggcttcgtccgggcggggaagtcccggtcgaaggggtgaggaccccccagcccacctcggatacggagggagccaccctctgccgacatcacccaatagcacccctttcagagcgacactagttttccgaggccacccctggctccgcgatcgcgagcggacttggcggcttaacagttccacygactggaaggaaggaaggaaggaaggaaggaaggaaggaaggaaggaaggaaggaaggaaggaaggaaggaaggaaggaaggaaggatgaaaaggaggaggaaggcaggcaggcagaaattggctgttggacccggggctggcccccgcgagtcctcgcccggcccgccccactctgtccaggatctgggcaagcgctcaaagtctccccgaggcggccagaggcacctgcccctcgcccggccgggagcagacgctgccccctcgggccaggagccccaaaaccgcctctccgcctgcctcagcgcctcacccagaggtggcgagaacaccattcataagacctgcggcttccctgcctccaaatccaccccaagttaacccgagtcgttaatccactaaagccagctcgctcgcaaatacacgagcagacacacgckcgatcgcccggagcgcctccgagatccgggggctgccggggaaagcccggggcgaccacctgggccccagcacgcccgggacccgctgcttcccccgcggtgctccaactccggaaggtttgcacaaactccccgcgagcgatcggaaggcgaagagcgccctgcaaactccrgagcctccgcggtccgtccgctggacccagcggacccagcggcggggcgggggccgcgggctcgggggcgcggggctcggccaagtacaccgaggcggccactgcccgacgctcgccccccgcccagcagcccccgaagccgcgctccctgcccgcgaggcgggggactccggggaccgcgccgtccccgagctcccgcgaccctcctgctgtagagcgctcgagcgccgggcttctccgcctgcaacccctatatctggctctctctgcaatttagcagaacacaaatgtaacaattttcttcttgttaattgcatctcctgacatttctgcgcgttgggggaaaaaaagaagatgaagaagtaagagctgaaagaagagagaagccccgccgcggctggaggcgcctgcaagcgcaatgctctggcagcgctcgccacgcagaaggcgccttttttttcatattgaaaccacgcggaatatgtacattttttagtcttacttacgctttcagggggttgtgaatgacagtcgccattttgctacaatgtaacagaatattgtctcagagttctaaaggttcgctcaggggmagcgacgggccaatcacagcgcgggataccggcccgccggccaatcggcgctgctggtagctaggtgggcggggcctgcgccgtggtagttattaggrgagctgtcaaagcccagaggtcactcccttttgtagagcccgagagccagcaggtcttaaaggggcagtacmgcgctggtagctccttttcgggctggggaaagtggagacgcacgggagagtattatagtttggtttaactccctacttttctaaataactgcagaagagtttgcgctcccggacagaaatatttaaatattgccagcaagccactgaatcctattcattagcctttggctttgcgtatyaacatttttaatcccccaaagggtaaatccccgtgtttcagtgcaaaagttggaaggctgccgtttcgtgttaacaaattactacatgtgctctgccgtttgctaatgctctgggtcctgccgctttttaatattcttattcccgaagtgttctctttatctcggccaccttcctctctcgcttcttggaactgtcgctgctgttcctg

SEQ ID NO: 7 - DNA, 95050 bp, Homo sapiens
  misc_feature (18543)..(18543): n is a, c, g, or t
  misc_feature (28737)..(28737): n is a, c, g, or t
  misc_feature (45763)..(45763): n is a, c, g, or t
  misc_feature (51178)..(51178): n is a, c, g, or t
  misc_feature (51180)..(51180): n is a, c, g, or t
  misc_feature (62241)..(62241): n is a, c, g, or t
  misc_feature (62541)..(62541): n is a, c, g, or t
  misc_feature (64042)..(64042): n is a, c, g, or t
tccgtgttgctgcgtgagtacaatctctctctctctctctctttttttttttttttttttttttttaaaaacagggtttcactctgtccccaagctggagtgcagtggtgcaatctaggctcactgcagcctcgacctccacctcccccagctcaggtgattcccccaccttaatcttctgactagctgggaccgaccacaggcatgcaccaccacgctcagctmatttttgtattgtttggtagagataagttctcgctatgtcacccagcctggtcttgaactcccgggctcaagcacacctccatccttggcctttcaaaggtctgggattacaggcatgagccactgcatctgccacagtccccagtctgaatgcctccctctggtgggctggagctctgctccgagatggcatcgagtcatcctttctgcagaggttgacgacggggcacccgcgtggagcactgtgggtcactgtggcagaggccaggcagggccagcrgggctctggcactttgcgcagccaccgggaagtatctggcatcacccccactcacattccacgaggcatagcaagcctagtagaataaacgtctccttgcaaagatgactttcatctcccgtttcattccattttcctaacggagagaaagtagagaaaggcaatcccactgtgtgtccaaagagagccagacatatttggtggccagtcctgaagactggcacgttggacagcagctgtcctcgagtgaggaatgggacatgcatctagtcaactacaccgcctgtgtcctttccactacgccgcagaaactgtgcagccgcactgctgtttttaattacaaagtttaagtcgtatgtattttaacactctttcaaaagttaaaagactgaggcataaaacctcagtatctcttaatctatgccttgttttaatgaatgtctattgagtcctctcagagagaagttgctggagaatatacagtagcaccccattatctgtgggatacgttccaagacccctagtggatgcctgaaaccatggatagtcctgaaccctatatataaatatttgcacatatgtctatatctacacacatgcatatacatacatgtatatacaccatgttttttttttttcagtctgatcaccgagacagctactaagtgactaatggatgggttggatgagtggcgtctacagagtgaatatgttggacaaagggatgattcgcacccggggtgagatggagcaagatgcagcaagatggcacaagatttcatcatgctactcagactggcatgcaatgtaaaccttatgaactacttatttctgaaatgttttcatttaatattttcagacctcggataaccacaggtgactgaaaccacagaaagcaaagccataggcaagagggggctactgcacggggcactgggtgacatctgaaggtcagatcacacacagactttagtgtgagtgtgtcccaaatggtgcagggagccgacttatacgaaaaaaattactcattacttatctgtcattcaaatttaactagcatgctggggggagggtgtggtctgttggtttgtttttgctaaatctggcaaccctacctcaaagggggaggggctcattctaccaaacaatgcatcaaagcatgggttttgtaaaatttaaattataggaaaacgtttaaggcaaaaggtgctctaatctctgtaagggaggcagagctcattccctaataacactgcatgcacactcgaaggaagatgtagtgagataatttctgtgttcatcccagctccttgcccaacatgcacccccaaagaactctggttggttggatctactgcacctgcttctgaagaaatctccaattttggtggacaccctccctctacattacccgcctgacctttcagaacccagcgggccgggtctcagcacattacctgggataaagaagaccttgatatgtgttcattaagcaaaactgaattggaaggaagaaaacagagagggagggaaggaaaaaaggaaggaagggagggagggaaggaaggggaagggagggagagagagagagaggggcatggagagaaggaagaaaagaaggaagtaggaagggaggaaagaaagggggaaagagggcagaagagaagaaaggaagggagggagggagaaaggaaagaaggaaggaaggaaagaaagaaggaagaagagagggagggagggaggaaaagagagggaaggaggaaagggagggagagaggagaggagggagggaggaaaggaaggaaggaaagtgatagtatgggatcccattttgactggacatctctgaaaatgcccctgtatgctcaccaaggccctcaagaaggcactcaacaaatgctaatcaatgaagcctgttccctttctcagagccaccatcagcccctacagcacctgcatgggaatcaggacaggtgtccccttcaggtaagcacagctcccagatgcagaggtcagtgagcggacaccacctgtggcttgtgccagttggaacacggccccctttcccctggaagaagcaccgccaggtcccacagcctggccagcagagtaggaggctgcgccccagcccttgcctgcactcttcacatccgctccctgctcctgatggaaaggctaaagcattgggaagtgctctcagagctggactttcaccccttgtagaaaatgtcttctgcccagattacccacacccaccaaagagaggcagaattgaaagaaagagaggaaatctcccatcagcgcgtgcaggcacacccacgcacaccccagtgatcgccaggtgtgaactgtatgtaaggtaaacaattccactggagtggtgagtgaatggagctcatccaattcgatattttctagatggagcgaatggtgtctacattctcctcacttgtttttacttttttagccgtctacttggtgtttttggtgctgcttaaaaatgatttaaagaaacaaaaaaggcattagggggttgcacataatgaaatgaggacgactgcaaccaaggctgacacttattctttagttaattcaattgtgcctaattatcttgttgctttgcaatccagcctctcccccaaccagcaagagcctccggaacattccttataattgcagagcagcccgagagctgagatgagtaatcctcagcgttctcattctctgtcctgtccccgaatgcctctcaggatgtggaggagaaaacttcggaatccagatctttctctgagctttgtgaggagtctctgcctgcgtttccctcaggcgtcatcgtgaatggccggcagaccctgtgcacgtagaatttcctgtctggctgtaggggaaaccactctgacagccaggcagagatgaaataacccaactgaaaattaattaactccaaaacctccgcagaaaataaaacacaccaagacatatatgggccgcgagcaactttcagctttgggaagggatgggatgtgattattcaatttttctagtccttgactccaggttcttacacattttcttctgtgcctatgctgcgttctgtaattagaaatttttccaacactctaaaacttcaaaattataccctaaagtcaagttttcaacaaaagcaggacttctttggcttaccttcactgtaatttggtttgggaaagtgtggttttcagccatagcaaagaaaatggtcttcagaactcgaactgtctttagtgaaatgttatttttcaccaaatatgtgttcccacaaagtgttttctagcagctgggagaggtagccagctgagctctgtgttgaaacgcatgccctgatacccccccgtgccccatcctgcagcgaattcttgggacccatgcttcttaggacctttggtcctcaagctatttagagatccatggaaactgcccaatgaacaaggacaggaaacagggaaaggctgccgcagcggattcttcttcttctccttccccttccccttctccttctctttcctcttcctcttccctcctccctcttccctcttccctcttcttcttcgtgaatgagcgcactgatgaatagcagaggatgagaaccctgcaggccaggcacaggcagcatcaaagaaacagagggtggagcacaggtgcccagcccaggagatttaaaatcagatcagggacgggcgcgatggctcacgcctgtaatcccggcactttgggaggctgaggtgggcggatcatgaggtcaggagatcgagaccatcctggctaacacggtgaaaacccatctctactaaaaatacaaaaaaaaaaaaaaaaaatcagccgggcatggtggcgggcacctgtagtcccagctacttgggaggctgaggcaggagaatggcgtgaacccgagagacagagcttgcagtgagccgagattgtgccactgcactccagcctgggcgacagagcgagactctgtcaaaaaaataaaaaataaaaataaaaataaaatcatcagatcaggcagaccaaaaggccaagtcaggatattttgaagttgtaccccctcctcggacttcacctaatgctcccaatgtacacagaatgttctgtccctggatggaaggtgacccaaaatagagaagaatcatggaaagacgaaggcggcagcctttttgccgccccacaacacctgacacccgagtgatgggtgtggccctcaagccaggaggcctgcgtttgggtcctggctctgccgcttaatggctgtgtgatgctgagcaattacttagcctctccatgcctcagtttcctcccttgtaaatggatctaatgaagacacctacttcccttactcttcgtcgtgggaaccaagtgaactaatgcatgcagcatgctgaaccctgcagccgctgtggcgaaaacactcattgagatgcaagtctccacgcaacagcaggtaaagccccattggaagtcatcgtttataatctcaattatttccttgacctagaattgttcaatattaacagaaatgagatcagaattctttcagccaggcatggtgccccaagagtgacagtcctgaagccactgctatttatggagccctttccacagaacacttccatgaagcacggttaycattcccattcayggaagaggaaactgaggcacaatgctgtcacgtaatttgcctacacagccagagagcaactgagccaagattcaagccctccgtctgtccacggcctgccctctcagccactgtgcaatgctgactgcagaccagccacaactgttctgccagggctctgagtaaccggaacatggtgatttaatcaggaggagatatttgcagagatgttgaaatgggggacatccataagtgaaagcagtgatttgcaaaaataatctggctgctgctttcccaagcttcctcctatggaagcctcccctgtaacaccgagtggcacaccttctctgccctggccggagccgagggcacagtccctgacagagctcagcacccacctccaagacacacagggagacagtcttggggtcagcgaatctgcacattccgccggcactcgcagggccagacaagctgctctggcccaatcttctcattctgtggtcgacacactgcggcccggagggagcagagggtggaatttcccagggtcaccctttggaaggatgccggagccagaccctggcctccccgaaggaaaataaagcagtggccctgagccggggccacagagctccatgtggccggagcagggctgcggtgggaaggggaaggatggagactggggcaccctcatcaccggttaaggggctctcctgccaggcgcacgagacagaacattcatgatgctctgagacagaggaaagaaggtacggacagcagggaagactctctgctcagccatctttccaacatattgtatttaaactatcaaatgctttagccaatctgcaaaaaataaattctttgcacaggggggtgaaatctggctctctcctcagcagaaggcccttctccacggctccccttggctcccacagaaaacacagggcagcttctgcagcttctccacaccatatatctagaatttacataatcacaggcaaataaaacgataaaagcacactctttcataacaggcacattgttactattattattcttaaggcaaattagcttctgattatagagattagtcaaaaccatgattctgttgattgtgaggtagaactgattttcttttctttctttttttttttttttcaacaaggagaagagctgttgtttcgatgtcagaaaattacataaaatggtactcagagagaaataaagtttctgaaagtcatttaattatcagttctcttggaagcgtttaggcattccagcctttcggttgttgtctgtctagccaaacattttaccctcaagtttattaactgtttgattttattttatttaacctctttcttttaaaagtttctccaatttaaaataccaatattttagatatttgtatgtgtttattgggctttcttcatcactgaaataattcatacctcttttgaaccaaagagatgcttgttctttcaccagcatttttgatcaaagacaaccaggaaggaagcatctcctccctgggcaaaatggaggatccaaaaccattaagagtctgctgcaagatgtcaccactcagactcagagagcttctggctcctcagggcagcgccaggcaccagaggctccgtgaaagcccttggcaggagagcagcactcacrttgctcctccctgccccctacctgttttaatcattagtcctcagttaggtccagtgtctgagccctgcctccagagttgagtcccgcctcctacctcacctgaactaactctgaggttccaacctgggggtgattttgccctctaggggacatctcacaatgtgtggagatggtggrggttatcagaatagtggggaggtggtgggaagaggcagcgtttgagccacagggcagtcccaccacaaagaatgatctggcccccaatgtcagtagggtccctgttgagaaaccctggtctaattgatcagaaatggtgggtgaactttgaacagataacaccagggagtcgtgcagctctaggggaatcctctcggaccctggagtgcccgatagaagcrgcgtgcacatggggactctgcccagatccgagtccttttgtccatcatgatgtcccagattcctgctgtcattttgcatagaattagactggaacatgcaaaaatatatacaattgttgataccaagatgtctgaatttaggaagaattcccaaacagaaagatccctcccccaaaatgtatgcatataaacttttaaggatgcagataaaattgccagatgtctttcaatctgattacctcacatgctggcctgtatcccagatgtgagatccagagaaacgtgatggaatgtgtcactgtcttcttttcacatcctctcccagatttcattaatctgctgataggtactcattaaaatactagtattcgccctgggacacagtttcatgagattacttcacgaccgttacaggacatattacagtaaatgaattttccttcttttagcatggtggattaaaaaaatacataattttgtgccccagtcctcaaagaattaaacatttcagcatatcttacgacaggatattggcaacgttttctgtaatgggtcagatagtaaatattttgggctttgcaggtcacgtggtctctgtcgcaactactcaacagtgctatggcaggacagaagcagccatagatgatgtgtaaatgaacaagcttggctgcattccaataaaactttatttacaaaaacaggctgtgggaaggacttggcccgcaaccctggtttgcctacctctgtcttacaacatagatttcctgaaaataatgcatctaggcagaaagaataggggaaagttcagagtaagacgttgtaaaatatcggcaagagttctcatcgtcttacaagaagtagcctgtgtacaacttaatatcaatccaaggaggaccaagaggcatgccgaaatgagatttaaaggttaaacagaaatctggagggaaaggaaraattgcaaccacactggccaatgatctagtgttgttactctcatttatttgctaagtttccctttcagtttaaagcacggcatttaattcagacattgtccttcactccccatgagccaatgaaagaggagatgcgtgggctgtggaggggctgagatgcttgtggrcacctggggcagcggctgtgggctgtggtctcccgggctgtgcaggtcaggaggtcaggaggtctctggagagaggcatcatcatggagctgggcctgctggagaaaggagttggccacggacaccccaaacaccccgatttgatcatgacactttctgtgcatggaaccccacatgtaccccttaaaattttaccctgtaaaatattatgtatcaatasaagagagcaccaaagcaatcatcctactagccaccatatgccatcctagcttctccacagtaacacgtcatttactcctcagagcggctcagcgaggtagggcctgctgatggtccctttcacaggtgagaacacagaggccctgggaagctgaggggtttgctagagatcaggaagccaggactcgggcttgggtgctgggctctgggcctgtgtgtctgacttctccgagggggtgctgccttctcctttcctctctttctccctaacccccccacactcagccactaagtatttttagaattattactatttaggtatcatctataaaacatgacatttaccattttaaccatgttttcatgtatactccagtggcatcaagtacattcacaccattgtgcaaccatccccaccacccatctccagagcccccattcaatagaaacccccccttctcccctcccccagctcctggccaccaccatcctgctttctgtctatgaatttgactgctcagggtgtctagagtggagtcctgcagaatgagcccttttgggtagaggtgatttcattcagcacaatggcctcaaggttcactggtactgtagcgcgtgtcagggtttccttccagtttaaagtagaatcctctggttgtttgtccattactccatggacacctgggtggctgccacctgtgccctggtctctaagagctgctggcactctcgctcctccctggtccctttccttgctcacctgccctcccctggctcggctcctcctcccaggcctccagcctgccttcccggcaccccacgcctgctgcctcgggaatcttgcccaaactccaatctgcttgggcctctcttactggtaaacccacaaggatccccaccttcagcaaaaaagagttccaaaggctccatgtaggagcccaggcccctcactgactgccctggccagcctctccagtgttgccccaacggagccctgccctatgtacctacccttgttttcctgaaaaccacactctttcctgcctggaggacacccttctcaccctggagagattacccttctagaaacaaaccaaacacaccctctgcagaggctctgccagccgccttctccaggcaaggcaggctgcctgcccccacgctcacggcagcttcctggcatacttgctgcctcggtttgtgcaaaagcaaacctgcaagtcgcatacttaggggatggcccgggaagcccataaggatgtgggagaacaagacagggagggcaagaaggacaatcacagactcatcctggagcacattcaactgtgggacacaggaactcatccctgagactgcctggaatgtagctcggaactgtcccaacagctcctaaccttccgaggttgatggtccctcctggttaactccgtggccagcaagaggtcccaggaggccatcactgcacacagcaaccatccaccatgcctgcatgcaggtggcctctgggtggaacagagggatgtgggcaaaaatctgggatgaccgcaagggcgccaggcacacagtgggtttgcgactgtggtatctgcctctcccacgggaggcagaccccatcaccaatttctctctgtacccccagcccatggcaggttggagacatctgaaaaaggtagcaaatgagtccatgagtggctgtgtgggaatgagatggactgggtcttgggagagaggaggcaggagtggatgttggaaagacaggctgctgagaggagaacacagtggcagggcaggtgagcagcggccaggggctccctcacacacttcaccccagcccctgcgccagcctcatctgcctgtctcccacctgacccttttgccgttcacctccgtcctctctctgctgggttctcaaggcaatcgcaccttgcctagcaactgttgctaccgaaagccaacgtccctggtattccaacaataaagcacagcgctccgactacaactcccagatattattgaaaagaaaggcaggtttatttcaaggccaggaggggagaggatctgcgtgttggaggctggagcagcagcgcattcgatggccggcctgacagcatggcgagcagcttgtgctggtgcgtcctccagaaaaagaatgcgcgctctccaggaggtgatggtccctgttcataaactccctgttgctccctgttcccattcagctgggtcaacatgtgcctgtaaattcctcccgaaagggaaatcataacagcatcagcagccccagaaatgacaaacaactcaagtatggaaagccagctgccaagtattcaacagtactcatgttgcaccagaaacaaaaaaaatcagataagaaaaataaacccagttgtgtgcatagttccttaaatatgtatcccattttgtggttccttccagtcttcggtgtaatgaatatatccattggttaggggtcacggaatggcaggtcctaccaggctgccttggattggcgaactgtgatgttctgctttctcccttctctgaagcatggagcggtgcgagacgttcagaacagacagccactgacattaattttcctgctggcctccttgctaaattgttttatgacttgtttgctgtgtcttggttgccctattgtgttgagttgatttggcagtggttatttaaaacatgctttgtcatcctcaggatgagtggaggatcccgggggtcacttttgcacaacaaatggtcattgagctgaagaactgtcagagtcaccacctccacagtcaagtggcaatggaatccgaagacagggtcagctcggtacaccacgagccgagatccacgggacggacggtgtgcaggcaccaaagcgtggacaggccatgctttgcttaacagcatggggctggccacggcaccagggcctctgccagcctcacgaggcccctcctggcgtggccataaaagccacagctgcaaacgctgacacggcaagaaaagaatatggtgagaaaccagcttttgcctttgcttctcagactcctcggaagatccgaagggcactttcccatccccaggaatgagaggccagattcctccatggtccagtcaggaaatgtaatcaagcatcaacgcggagccaggatctgtgcctcaaacttgaaacgtggccctatcttcaagggtgctcacactcagatgacttaaaccaaaaatgacacggtgtggcctgcacttgcccatgccatagtcaggaaagcctagtcaaggacaacgcaagcccagaggaagagggtctaaacccagccgagaacagccacccagagcagaggccctcccctgagagaaagccacctgctctcagccatccctcttctttccctacgagctccaggagacagaaaccatgatgcttaggtagacatcaatctgttatggcaggcaccagaatgtttcttctcctgtgtcccatcaggagtcaaaactgatctcagcctgggcaatgtagcaagacctcatctctacaaaagataaaaaggttagccgggtgtggtggggtgcgcctgtagtcccagctactctgggggctggggtggaaggatcgcttgagcctgggaggttgagactgcagtgagccgaaatcataccactgcactccagcctgagtgacagagcaagcccctgtctcaaaaaaaagaagaagaaaagtgatatctctgctactgaggacaaacatcatgcaccctttcttcttaaagaggagcaaatttcccacttccaagtcctgttagtgaaagtcccggaggagccccagcctgagccatagcaggagagtcgcagagagatgaaagggtctgtccccagcccactgtggcctccagaggtagcatcttctgctcagcagcagaacaaacatttccatggagcagctaagttgaaaagcccccaggaggcaagggtaggagttacaagaaaccagaaagtctacggcaaggtcagggtgactcgggtggggtttctcttgcttcccctttcaatagcattcatgaagtggctgaaagtcttcatcttgttattagctttgctttctggcctcgtttatctctaattgttttcctaagccttgaagaggaaattctgttttctttctggtcctgcttacatttaaatccacttaagtttctgtctgtggctttcttctcaaaagggccaccggctccctgggggacaagcatcctccttataaagttgaagggaactgggaagatcttgaaagacttctctattgttcatgcagacaagttgtgggaatttatttctgtgggtctgtttcctctttgttcagggggccccattcttctccaattatctgcctataccagagagtattttcagaatctgtgcaggatgttttagactgaataaggacaagcattgagggaggttgatattttgctaataataacagtggaaaaaggtaccatttctgaagcacctactgtgtgctggaaccttctgtgtgcatcacattttaaccctctcaactctccaggaatgtattatgacacctactctatagattcaaaaactgaagggcagagatgtaaagaacttgccagagttaccagcagtgagagaaccaggggtcaaacccaagattgacccaagctcctgctgaccccacgatttcacgtggcgcccagtgaaactgtaagcaaagcaccactccacaaatgcctcactcatctccacacccacctgacacagtcattggattttaggacacgcatccttctttcaaagttcaggaatgttcacaagcaagtcaaaattcattttgaaagctcctttgacttgaccgaagacgccccaagatgtcaccaaaagccaaggatgggaagccctgttctatcaaggtgctgaaacccagtcctggggagtgtttgacttgggaagtaggctgccctccttctgctcaccgtgggcagggaccagagagagggtctgggattcaatacgagcctgatgggggttctgccatggggtgttggacgggggcgttcgacaaaccagtgcaggctcaaaccctgctcctcttgcccccagccccaagagtcaccgagaaaacaaacacagtaagtctttcttaaacctcccaccaagcaagggtgcaaaggaagaccatgggcctcagcgtgaatgcccacgcaccacagctcttggcatgggtccccctgcctgccacatgttaccaccactcgctttgaagaacagcgtgttcatcagcactcacgaggcttaacagccacagtttaacctagtaatgcccagcccccacagcaggctagtcatcatggtcagtgagaaacagccagacttttcacgcagatgggcattttcggggccagtctctgcactctccaagcaggagctggttggagtctctgcaggctcaggcccaagacgggtggccttcccagcagcttcgccatatcagctgccacgtgctataccgatgtccttcgaggctcatcctaggacttcatcaaaaccgtttttgcagatgccaggactgtaatattcaccacttcccccaaccagcacatgaccttgatggagctggaatcagccagatccaaacaaactgggcgcaacgtctgctctccagctgcactgtgcttggggtgcactcaggggtttgttcagctcccccgccaaagaattggagaagtcgtatttcacatataaatatattttacttctcagttcactaacatcagcctctcataaactcactaaatgaaaagctgcaagaatcactttgttatggatatgtaaaatgacatattgcattggctaattatttctctatggaatgaacagccccatgactttcaggggccccaaaagagaacgctctacaacagaagcacaaggtcattctttagtgggcaggtaattgggaactccatgctaggctgtggcttattagggatttgcggttcccctcaatgcacattaactgaaaagctggacagtatctagagcaggcgtgccttccatggcaacagcatctccgtcttcccagtgcatatggctgtcaaagtccttgtcaggtaccagttcagaaacacataacccatcctggtatttttgtagtttcacacatctagtggactacttgtttgcaataacatcatctggtgagcttttgaggatttgattctgtggcacttcttgaggaatacattttttaatatcctttaatttttgcctaaggacttggctgaatccaagttagatccacatgtaacctttttaaggaaggctaaattgagacagaaaggccaagatttttctccgagtagaaatggatatttattacttaagaaattgcctaaatgttgctatcgaggctttataaagactcacttggtgtactggggaaaaaacacacaaagcaaaactagtccactgattctgtaccaattacaatgtttgccttaggtgaattgccaatctatgagtcatatttgtctatatcactctgcccagggtcaagagaagtgtctcaaataagcaggatgtggaaaagcgtttgatcacggtggcgatgccgaggtggggaaaattccagtgataacctctgaggaaaataagccatttcttacaactaaatcctttctgtcatttctaaaatgaaaattaggagcttatcaaaatgtaacatagcttaactatcaagatcaattagagatggaaataattgggtagctagtgttctctacagaaagccagtgtgtaaggaaacagtagtgttatttgtaggaggcatttaattatttccaagttgtgggacaagtaataaacaagggtacatttctggctgtagaattttgatctataaatgtcctttgaggaatcagcttgttaggtgtattagtctgttctcacactgctgataaagacatacccgagattgagtaacttataaaggaaagacattaaatggactcacacttccacgtggctggggaggcctcataatcatggcagaatgtgaatgagaagcaaagtcaggtgtcacatggcggcaggcaagagagtttgtgcaggggaactcccctttgcaaaaccgtcagaccttgtgagacttattcactatcacgagaacagcacaggaaagacccgctcctcatgatttaattacctcccacgtggtccctgccaccacatatgggaattatgggagctacaattcaagatgagatttaggtggggacacagccaaaccatatcattagcttttcaaagattgtactttcaattatgatcaaggttccatcttagaaaaagaaagcaaatgaataaaataatggtcttaaaaccaaattccaaattttggttgcttcaaggygtaaggtcttacaaaccatgtttggaacgatggtggatagttctttgatgactgacaaagagttataaatttcttctgtcaccttacagtagaaggagaatcagaactgatttttttttccttcaaaaattccccgctggggacaatgacctcttccacagctttagtgtgcacactcatgtacaatttgaacaagcaagccatgccttctaccccccagtggcatccctgcattcctcaacacaccaaagggatctggagacaacaaaggggtcagcagatacaggtctttctataacttagtgatacgtgtaccaagatagctgttttttcaggggaggaggaggatatttaagatattttaaacatctttttaaaaaattggatggtaccaaaagatagagaattgtatcttccctatccctagagactcatgccttcttccagaatgtcatgttacctgattttctgtttgcaccgggttgaatagtaaccccaaaattcatgtctatctggaatctcagaatgtgactttctctggcaatagggtctttgcagatgcaattagttcagatgaggttatagtgggttaggtcagaccccaaatccaatgactggagtccccataagtagaagagatagacacagggagacagaggcacagagggaagaaggtggcgtgttagtggagccaaagaccagagctgtgaagctgaggagcactgaggcttgctggcaatgccggaaactgggtcgaggcgtcctcagggagcacagccctgctgatgccttgacttcagacttctggtctccagaactgtgacaatatccatttctgtcgtgttcagctcccagtttgtggtcatctgtcacggcagccctcggaacctaatccgctgctgaaaacatgccccttactgatgtgctgaaccctattcccatatttggacaaagaaatggaatcatgtggcatgaccaaaaccatctgcatctttagcaggggcggcatcctaggctgcatgttaggatctcctggggtttttttaattttaaatcccactgcccaagctgcaccccaacccaattaaatcagaaactctggaggtagactcagacctgggtatttttaaccctccctgggtcattccagtgtgcagccaagaccgtgagaaccactgatctctaggatgcagcagcgtggttttctcacaaaaccactggcttcagagttagtcaagttttgggttaatttcttgttttgctacctcctagctgtgtccttgggcaagtcatttaatgtatctgatatttactttctcccatctgcaatgagattgtgaggatccgtctttttaagcatgtaaaatatctgaaaatgcctggctcaaagtagacagcaaataaatgtcattttcttttcattctcccgacacatagagggacaatttcaaaggacatgtaagaatccaggctgtagagtgaggctgtgagaatcaaatcctgactccaccacctactagctgtaaaaccatgggaacttctcagtgcccagtttcctcacctataaaatggggcctcagagagccattatgaggtttacatgggataataaggtaatttgacccaggtaaagcacttagaatagtacctggctcattgaagcattcattaaatgttagctcatattgtagatttacattatagacattatctgacaacactytgcacagcccgcccccccttggaaatgtgaacttcatgtggtacattttagcattgcttctcttcgccgtccagagcaacatgatatacacaaaagagtcagtagacagcagtccggagacttgagctctgagctccgctgagatgccactaagcttcaggatggaagacaacacttttctctatgcctcattccaggactcaaattataaaagaaagggtttactaagctgatccctatggttccttctagcatataaaagttatgatcatctgaatattataaagcaatagatgaagtttgggctgtgtttagtaaacaatctctatgtttttatggttaggattttattctgaggctagaattcacacaaaaacgtccagtatcgacagagaaggaatccaatccatttcattggaacaaagaacagccttagagatttttcaagaagtttcaggccgagtcacccagtctcccagtctaccgtataactgctggttgaagctggagagaagacattagtggctcatgcacaaactttaaagcttaatttatgtgagaacataaattgatacaacctcactactatgagattaaataatatgtatcaatagtctaaacaatacacagtaattatgtttctaggaatctctcctgaggaaatacaattaaagtgggaaattagataatagggattagtagtctacaatagtctaaactatacaaagtaattacatttctaagactcctgaggaaacacaattaaagtatccttttttcatgcttttgggaccagcaattggagaatctgcccagctcantgaaaagccagttaaatagggaaatcttaaacaatggtgcaaatataccataaatacgttgttataagttacaatataaaaatatgaattttctcaccagtcttgcaataaaggaccaaggctcttctctgagtatcactcatgttctgattggaattatgtgccctctttcttgcacaaaacacgcctatataattcatgctcttaattttgagttttggtttctttaaagtggaacacaaacttaaatatttggaggacaatgtgacagtagacactttctccattttaccattttattttctcaaattgttcagtttcctggctcataatctagttttatagcaactgtattattacttcactttattgcatctccccaaagcattctacttagtttttatagtttatatggaagcaaccaccctctttcttttctcactcatatttcacaggttagtattccaaccaatgacatcacaacaactgtcataaacaggtttgagaacaaacacggtaattaactcttggtaagcccatattccaaatagtgggagaaggaagactgaggcttcccgatgcaagcggcatatttaccgaaggcatagaagacgtcagcgaatccagcaaaacaatgcagggaaacagtgattatgagggttccttctgtagtcaaatatgtcatcaaaggtttatgtttaaagatgtttgaacatctggaatagtaactgatgctggcagaaatatagaaactatataagtttacaatgagaaaatagctaagtaacataaaacatatgatgaaatggtatgtagacatcaaaaactgcattttaaaaactattttatgatatagaagatgcccatattatgatctaatgtataattcaataaagatttaccaagcaatagaaaattttgtaaattctgaaaaaaaagtctattttctatctttcttataaaaaccaaagtgggccaggacttggaaaacgggactgatgtcatgttgaactcctcgcttcctttgaccttgatctatttggagtttaggcattgtttttaagaagaaaacatgccgcgcaggttctctaataataaaatgcacataacctcaagaaaaggtggggtcatttttcttcttatatggccaagtaagcttctcctagaccttcctgcagataaccactatcaactttggataaaaatataaaataaggcttctgttcactagactgtgagtaaaaagcaggaagactctagcagcaagctagaggaaaaaaaatgccaagaggtgaaattcccatttttatagcttttagcctgagggcatgtcaaagttgtcaccatgtaagtgagtgaatctctaaaagaaaacgttttgtttttctgggctgaagacaacagagttcagaacaactagggtcactggaggatgagggagtaattctggaaaagagacaagcacagaagaagcaccccaaattttctaagtgaaatctgaaccttatatgtgagaggtggattcaaagcagctaaactaagtgtaaaaaactgaactaaaattcaaactgctccaggggaaagagttttcagtttgagtccaatcaaattaattatctgccctttgaaaaaatcagtgttcttccgagaaatataacagaatccagatggcattcacaatgtccaggatacgatccaaaattacacaacagaggagagacaagaaaatgacctatccacaagggaaaaataatagatgaagaccaattctaaaatgacccaaatgtaaaaattattaaacgagaatttaaaagtaaggacagaagtgaaaatatgttctccatgcctgtaaagatggaaagcatcatcagataaatagaaattataaaaaggaatcaaatgaaaattctagagcatcaaaatacatgtatgatattataatgttagacacatgtccttgtacatttgtccaaatccatataatgtacaacactgagaatgaaccttactgtaaactatggacttaggtgatagtgatgtatcaatgtaggtttatcaattgtaattaaagtaccactgtggtgggagatgttgataacagtggaaggtatacatgggggtggagggtgggcagggagtatatggaaaatctctctattttgctctgaacgtaaaactactctaaaaagataagtattttcttaaaatgcaacttaaaaaattcttcatatggacccaatagcagaatggatatgataaaagagtctgtgaacttgaatataggccaagagaacttactcaatctgaaaaatgtaaagaaaaaagattggaaaaaattaacagagcctcacaaacccctgtgacaataccaacaatctactatcagtgtaaatggtagaatggagggaaaagtgagaataggaaaagagggaaacattttgaaaaaataaggaccaaaaagtttcccaaatttaatgaaagacataaatttacagataagaaagtcagaaagcctcgagcagaaaactacagagaaaaccacacccaatcacccatagtcaaacagttccaaagcaaagagaaagagaaaatcttgaaagcaactggagaaaaacaaaacataatggacagaagaacaccacatcaaatgacccagtttatcattacagaaggccagaatatactagaacaatatatttaaagttctaaatgaaaaactttaaaaacctattaacccagaatctgataccaaatgaacatatccttcaaggattaagacaaaataaaaacaagttcatataagagatagctgacaaatcactgacagcagatctctacaggaagttctttattctgaagggaaatcatatcacatggaaattcagatcttctgcagaaaaggcaatctactggaaatggtgaatatataaaatacctgggaagtatagaaaacttttcttcttgatttgtttaaaaatatgcacaactggccaggcttggtggctcacgcctgtaatcccagcactttgggaggccaaggtaggcagatcacttgagctcaggagtttgagaccagcctgggtaacatggtgaaamctcgtctctacaaaaaatacaaaaatttgctgggcatggtggcacaaacctgtagtcccagttactcgggaggctgaggcaggaggatcgcttgagcccaggaggcagaggttgcagtgagccaaaatcacaccactgcactccagcctgggtgacagagtcagaccctgtctcaaaaataaaataaaataaaataatatatatataaaattaaataaaataaaacaaaattttatattatataaataatataaaattatattttatattatataaataatataaaattatattttatattatataaataatataaaattatattttatattatataaataatataaaattatattttatattatataaataatataaaattatattttatattatataaataatataaaattatattttatattatataaataatataaaattatattttatattatataaataatataaaattatattttatatataataaaataaaatatatataaaatagcttatatatataaagctatttaagtgaaaattatagcattgtcgggttgggtttacactgtaaatgtaatgtgtacagtaactacagtatgaagtaaatggagataaatgaagcaatgtagctgcaaagtttccacattttacatggtgagctacaatattaacactaagtggactgtgataagttaaggaggcatattgtaatctttagagaaatcattaaaaatacagaaataaatggcttaaaagtcaatagataaattaagctgaaattatttttaaaaatcaaataatttaaaaagaaggctgaagagaagactggaggaacaaaaaactacataggacaaaaaagaaacaaacaaaaatggtagacctcaatccaaccatataaaaatactttaaatgagtaaataattagaaggcagaactagaatagaaggaagaactagaatagaaatagaattttaaaaggaaaaaatcctggacccatctataaaccgtctgtaagagaagcacatttttaaatataaagatacagataggttgaaagtaaatgagtggaaaaaatctacattattatatggaagcataagaaggctggagtgaatatgttaatatcagataaaataggcttcaagaattgcggccggatgtggtggcttatgcctttagtcccagcactttgggaggctgaggtggatggatcacctgagatcaagagttcgagaccagcctggccaatatggtgaaaccccgtctctactaaaaatacaaaaattagccaggcatggtggtgggtgcctgcaatcctagttacttgggaggctgaagcaggagaactgaggaggcggaggttgcggtgagctgagatcatgccactgccatccagcctggctgacaagagcaaagctccatctcaaaaaattaaaaaaaaaaaaaaaagaattgaatattttacagacaattacaccccaaacctggagaatatatttcttttcaaatgtacatggtatattcatcaatacataaaacataagacaagtctcactagaatcatatgaagtatgttctctgactacaaacgaattagaaatcaaacaacaataaaatatctagaaaatcccaaatacttaaaaactaaacaacacacttctaaataatgtatgggtcaaagaataagtcacaagagaaatggggaaatatttgaacggaatgataataaaaacacataaaaatttgtggaattgacctagatctgtgcttaggaagaaattaatagttttaaatgtttatatttgaaaagaagagagatctaaaatcaagaatccaaggttccaactaaaggcactagaaaaagaggagcaaaggaaactcacaaagttagtagacagaagtaaatactaaacataacagcaggaatcaatgcaattagaaaacaaaaagtaccaaaaaatgtaatcaaaagcttgtttttgaaagataaatatgagttgtatacctctagttattctgatcaataaaatagaaagggcacaaattaacaatattaagaatgacatgggagacatccctgcaggtgccatggatattaaagatatagtaaaagactatgctaactttaaattaacacattggacaacttagatgaaatggacaaattctttaaaacagaaaatctcaatactcatatatttatcaagaaattagcttctttatcaaaaacatcttcacaaagaaaacttcagacccagatagctttattagttaattctatcaatacttaaggaaataataacaccaaccacataaaattcttcctaaaactagaggaggaaacctttcctaacttgttttatgaggccacagaaaccctaaaatcaaagcctaacaaagatgttacaaaataaaagaaaattataggccaatatcattcacgaacatagatgcaaaatgcttaacaaaatattagtaaacagaatacaatatgtaaaaaagatagtatatcatgatgaagtggggacatatcccagaaatttaaggttaaattaacattcaaaaatcaatcagtgtaattcatattattaacagacggaaagagacaaaccatatgatcatttcaacagatgcagaataaacatttaacaaaactccacattcatttatgagaaaaattagaaataacgttatacatagggctatcatatttaatgatgaaagatttcaacttctcctgttaagatacggaaaaaggcaaggatgcccacttccaccattcttactcaacattgcactggaggttctagccagtacaataagatgacaaaagtaagtaaataaacaagtaaacaaagtcatccagagtaaaaaggaagaagtaaactgtatctatttttagataacataattgtttacatagaaaaatccaatagaatcaaccaaaccaccactagaactaattcatgaatttagcagtttggtagaatctatccttctaccaaaggatagaaggtaaacatgcaaaaatcaaatttatttaaaaaataaatttaaaaaataattccacttataatactatcaaaaaacttaagatacatagggacmaatttaacaaaatatgttcaagactagtactctgaaaattacaaaacattttggaagaaattatagaaggtataaataagtggagagatataccataataatgggccagaagactaacatgtcaattctctccaaattgatctatagattcaatgtgatcccaattttaacctgcacctgttttgtgggaattaatacgtttattccaaaaatctatatggaaatgcaatgaacctgcagctgcaccatacattatggtggccaataactacatgtggctacttagatttctacgtaggttaatgcaaattaaataaaattaaaaattaagttcctccaccacactaaccacatttcaagggctaaatactcacatgtgactagtgattactcttcttaaatggtgtagatgtgtaacatttttatcactgcagaaagttctgttggacagcactgacctcaaatagccaaagcaaccttgaaaaaaaccccaaaaacaaaaaactagaggacttacatacactacctgacttcaaaacatactacaaatctacagtggtccagacattgtggaatcacatagacacaggagaaaatgttcaggacttaagaataggcaaaggtttatttcacaagtcacatgaaacaaccataaaagtagaggtagacttcatcaaaattagaatcttctgctcatcaatagacattctaaggaaaatgaataggcaagccacagtctgagagaaaatatttgtaaaacaagcatctgacatagcactagttcccaggaaacataaggaacccctccaacccaaaaataaaagcataaataacccctctcctcaaaaaactggagtgagcaaaggttttaaaaagaaattttccaaaagaagatatgcaaatgttcaatatacacaacaaacagttctcaacatcattagaaatcaggcatatgcaaattaatcaggcatatgcaaattaaaaccacaatgataataccactacacatctattcaaataactaaaattaaaaacaatgaaaacaccaagtgttggtagggtgcagggcaactggaactctcatacattgttggtgagaatgtaaaatgatacagccactttggaaaaataccttgcagtttcctaaaaaactaatcacacacctgtgacccagtaagtccacaactagatttctacttaaagaaaataaaaacatacactcattcacaaaaagacttatgcaaaagaaaatagcagatttattcataatggcctgaaattgtccctgtgttctttaacagaaaaacagacgaacaattttttttattattatactttaaattctggggtacatgtttaatatattcataaaacagaagaagatttagcaacaaaaaagaccaactattaatacatggaacaagatggatagatctcaaaaatatgctgagtaaaagaagcaagaccaaaaaaggggcatatactgtatggttccatttatatgaaattttagaaaaggcaaaactaagctatacrgttagttagcagcgtcagaagaattgttgtctctggggatctgaggatgggaacaacttgggaagtagcatgaggaaagtgtctaagtgatggtaatgttctacatctggctaggctttggattgcagagtatgaacttgtcaaaattcagtatattcatttactactgttgcataacaaattaccacaaatgtagagacttaaaacagcacacatttattatctcatagtttttgttagtcagaagtccaaacacaacttccttgggtcctcttctcgggatctcacaagcctgcaatcaacatgataaccaggctgtgttctcacttgaaggtttgactggggaaaaatcttccaagttcattcaggttgtcagaagtcatttccttgcagctactaggctgaaggcactagcttttagctgggtatcatctggagaccatacttaggttctagagcccacagttcctagaaagtgccctccatcctttgcaatccaggtttctcccagaaggccacttttttcaccaaactcgcaaaagtctctggtcttgtctgctagcaagatggaggtgctgatggacagtgcccttagaccttctagaggtcctctggtttgattgagaggatctgggaggcatgccctcttaaaagatacctttttgtgactaaatatgctcaccttttgatctttcagattttagcaaagggttgcaaagtcacaccctctaatttttctctagaccacactgtcttaatttgagaatctattgccatctggagaggcttaaaattttcaaaatcatccagtcctagttcctttctgtttamgaattctcttgatttatctttctctcctctcacattttactgtaaacagccagaagagactgggatgccttcaacacttttcttggaactctcctttgctacataaccaagttcatcacctacaagttcaactttctacataactgcagacaacaatgttgctaagctttctgtcactgtttaacaaaggttctcccttctgtcagtttcccattacgcattcctcacttcctcctgagccctctcctgcagtgtccttaaagtccaggcttctattactatcagtcttttcaggaagacttaagctttctctattctactcccctgcccactgctgagtttcaaaaccacccaacgttttcagatatttattaacagccacaccccacttccaggtatcaacacttgtattagttttctattgctgtgtgacaaattctcatagatgcatttatgatctcatagcttctttagagcaggagtccaggtacgacttagctgcttccctgctcagaattccacaagtcttcactctcctctgaaggctccactgggggagaatccatgctggagcctactcttacagttgttttgagaattatttccttgcagctgtatgacccaggaccccagcattttgctggctgttggttggaggctaacctcaggttctgggggcaagacacagttccttgctacatgggcttttccaatatggtcacttacttcatgaaggccacaaggagtctctagctccagcctaccagcaaaagggagtcttacaaaatgttaacataaccataggagtgacatcccagcacctctgccatatgcatctgctactggttatgagcaagttataagggattacccaggatgtgagtatcatcaggggtcaccttaatgtatgtccaccgtactcagagaatgcacacttcagatttgggcattttacataaaaaggaaaaggtagattggactctagatatgcatgctaaattgtttagggagaagtacaccgaaatgcatcagtaaaaaagatgaattgatggaaggatagagggacagatagatgaataaatatataatgacacaagtgtaataaaatgtcaatggaagaatctaggtgtgggtatctgagtatttgctgaaaatttagttcaatatttctgtatatttaaaaattttataacaaaatattagaaaagtaaatgtatacttattaaaaagagcacagacataaatgagtcatctatttctttatacttttcagcattttctcactttactccaataatcatgaattttgtgtataatcaagagttgggggccgggcacggtggctcacacctataatcccagcactttgggaggccaaggtgggcggatcacgaggtcaggagatcgagaccatcctggctaacacgatgaaaccctgtctctactaaaaaaaaaaatacaaaaaattagccgggcatggtggcgggcgcctgtagtgccagctactcgggaggctgaggcaggagaatggggcgaacctgggaggcagagcttgcagtgagctgagattgcgccagtgcactccagcctgggggacagagcgagactctcaaaaanaaaaaaaaaagagttgggaaaatgcatttagtttataaagcagtcaatatatcaagccagcgatctctccagtccattactgagtctttccctgctttcccatgaatcagtcaccaagagaacagaaagttacccccacctccaaacattcttgaggttttctactagccagctgtggagtgattattcctctgttcacctaaacctctgaaattgcacatttttaggatgcattatctcttcgacataacagttgcataatagtaccacaagttgcatacaattgctcttctatttatatattataaaactgcctccttaatattttagattctcccctctggttctaatatttttaaatttggtaaataaattgaaattcacgctaatcctagtgattcagattctaccataaaaatcaatactatgtaaaactggagtgcttaaggctaaatcaacaacatatgtagtcatacctattagtgtcctgcgtttgtaggtaaattaattagtattacttggaccacatcataccacagccaataaaaataacagatgtttggagaatgaagtaactggtgtatacaggcctagacattggcttttttgtttttgctttttacaagagagaatggttctgtccagtcaagcacattattaaggcattcatatttaataagtgggtcctaacataggaaggaaagttctaaggctacttattggcattaatatattatctatgctcccctcaaaattatttaatcaataagtatcagtcacctcctctgtgttaagtctattctagagaggatatagaaaaggagwgagagtaaatacacaaagtcattagcaaagaatacaatacagtatctagctatgtgctaaaatcactaacagttcaatacagcatttgttaggctagatactaagaaattagcaacagaatacaatcttcctcctgccttaaagcactcctggttctctgcagaacagagctgagatgtaggacatcagtaaatcagacctagaaaagtcaaggggtttacagagatggcaggaattcgtgggaaagaaagccaagatcttcaggatgggttggctttagacggcatcagtaaaaccaaggaccagccttcagtatcatctttagttgtggggtaaaacaactgcaaccccaatgttactgcctgaggacttaacagttaacctggctgccactgggatgggcaataagctcaaaccacagcatggagttttggggggaccatgtctctcgggacctggccaatatgatgaggataaaggatgaataagtaaaccctcaatgatgattctctcaayactctcaaccagtgttctcagtgaaggttggggggcatcgtggaaagctagggggaaacgattttgctgatcacattatttgagaggtgctttttgaattttcaactgtattcacctaaaataaatacatgataaactgcatatatttaagtgtactatatgcttatttaagtgttttttccacacgcacacacagacacacacacacaacaaacctgcaagaccatggctacactgaagatgataaaaatattcctcactctccttcacaaaggtctcatgcccacttgtgatgcttgcatgcccctcccctcttccatcatcctcaggcaaacattgatctgctgtccttatagattactttgcattttccagaatgtcatctaagtgaactcatattgtatgtattctatttgtctggcttctttccctctgcataattatttcgagattcatctatgttgcagcacgtgttaatagtctatttctctttattggcgagtagtagtattccactgtctggatataccacagttattctattcatctgtgaataggcatttgagttgtttccagatattggcaattacaaataaagctgcaatgagcatttgtgtccaggtctttgtatggatgtatgtccatacataaatcatacacaaatcatttctcttagatgaaatggaatggctcgcactgttttccaaagtgtcttactcatctcacaagcccacctacagagtttcagatgagccacatccttgccaacacttgctatggtcagtctttaatttatccatttcaactggtttaagtgctatctcactatgtttttaatttacagttccttaataactaatgacactgagcatcttttcctgcccttatttgtcatycatatatcttctctggtgaagtgtctattcaaattgtttgcctaattcttttttttttttttactttaagttccaggatacatgtgcagaacatgcaggtttgttacatagatagacatgtgccatgtggtttgctgcacccattgacccatcatctgggttccctcccctcactccccatcccccaacaggccccggtgtgtgatgttcccctccctgtgtccatgtgttcatattgttcaactacctcttatgagtgagaacatgctgtttggttttctgttcctgtgttagtttgctgaggatgatggcttccaacttcatccatgtccctgcaaagaacataatctcattcctttttatggctgcatagtattccatggtgtatatgtaccacattttctttatccagtctatcattgattgggcatttgggttggttccatgtctttgctattgtaaatagtgctgcaataaacataaatgtgcatgtgtcttttttttttttaagttggagtctcgctctgtcacccaggctggagtgcagtggcacgatcttggctcactgcaygctctgcctcctgggttcatgccattctcctgcctcagcctcccgtgtagctaggactacaggcgcctgccatcacacccggctaattttttgtatttttagtagagacggggtttcattgtgttagccaggatggtctcgatctcctaacctcgtgatctgcctgcctcggcctcccaaaatgctgggattacaggcgtgagccactgcacccagcccacatgtgtctttatwgtagaatgatttatacccctttgggtttatacccagtaatgggattcctgggtcaaatggtatttctggttatagatccttgaggaatagccacactgtcttccatgatggttgaactaatttatattcccaccaaccgttttaaaagcgttcctatttctccacagcttcaccagcatctattgtttcttggctttctaataattaccattctgaccggagtgagatggtatctcattgcggttttgatttgcatttctctaatgatcagtgatgttgagctttttttcatctgtttgttagctgcataaatgtcttcttttgagaagtgtctgtttataatctttgcccactttttgatgggtttttttttcttgtaaatttgtgtaagttccttgtagattctggatatcagacctttgtcagatgggtagattgcaaaaattttcttccgttctgttggttgcctgttcactctgatgctagtttcttttgctgtgcagaagctctttagtttaattaggtcccatttgccaattttcacattttttgcaattgcttttggcattttcatcatgaagtctttacccatgcctatgtcctgaatggtattgcctaggttttcttctagggtttttatggtttggggttttacatttaagtctttaatccatcttgagttaatttttgtataagatgtaagaaagaggtccagtttcagttttctacatatggtttgcctaatttttaattaaattttttatcattgagatttagagttctttatacattctggatacaagtctttatcagatacataatttataaatattttctccagccttgtcattttcctaagaatatcttttgaagagcagaagtttttaattttgataaagttcaatttatcaatttgttattttatggatcatattatggttgttctaactaagaaatatttgtctaacccaagtcataaaggttttcttctataagttctacagctttagattttatattttggactagggtccattttgaattaatgttttttatatgcttagatcaaaagtcccagcacaaactgttgaaaagaatattcttcctccattgccttggggagttgtctgtataagtgtgggtttgtttctgaactttattctgttccactgatatatttgtatattttaagccaatactgcacagggttgattaccatcagtctatgataggtgttgaaatcaagtaatgctaatcatttttaaagttgttttggctattttaggtcctttatagttccaaaggaattttagaatcagtctgtcgagtgctacaaaaaaaaaaaaaaaaaaaatacttgctcggattttgatgaggattgtgttaaatccatatagcagctttgggagaactgacatgtgaatagtaagaacgcttcagatccatagacatactgtatgtcttctccacttgacgtcttctttgatttatctcctcaatgttttgtatgtttcagtgcatacaacttgcacatcttctgccaaatttatccttacatattttatattttggatgctgttataaatgatattcctgaatttcaatttatgatcttttttattcttaatatatagaaatgcaattgatagctgtgttttgattttgtataatgcaaccttgctaagctatttgttctggtagcttttattgtagattcatataatttttcaagacaaccacatcatttgttcataaggtcagttttacttcttcttttcctatcaagttgtctttcgtttctttttcttgcctgattgtcttggctaggatctctggtatgataatgaatagaaataggaagagaacatatctgtgtcttgctcttgaccttagagtaaaaacattcagtctttgacacaagctaaagaatttatgtagatgcccaatatcacactgaggaaatcccctcgattcctagtttgctgagagttgtttttagaaatggatattggattttgctaaatatgtttttgggtaaagagaaggagggtgtctattgaaatgaccacttggtttttctttctcagtttgttcatatagtgtgtatatgtgtatctactatacacatatgtatagtgtatctactatacaatgtagattgattttccaatgtaaagtcaacattgcattcctgacaaaccacacgtggtcataatgtgctatcgtttttgcatattgtttcattcaatttgctaaaatttcatttagcatttttgtatccaygtttataaaggacactttctgtgattcccttttcttacaatgtctttgtcttattttggtattaggatagtactagcctcacagagtgagttgggaaaggttccttcctcttcaatttttaaaaaatgtttgtagagaacaagtattatttctcccttagatgtttggtagaattcacctgtatagccatttggcttgacatctcactgtgggaaagtctttaacaacaaattccatttctacagtagacatagtgttattcaggttatttaacttttaattggtaagcattgatgatttgtatctttcaaggtatttgtccatttcatctaagttgcaaatttattggcataaaatttttcatatcattcccttattgtattataaataactggacaagctatagtgatatcacctttctcactttttttttttttttttttttttttttttggaaacaggttctcactctgtcacccaagctggagtgctgtagtgcaatcatagctcgctgcaggctcaacctcctagtctcaagcaatcctcctgccttagccccctgagtagctgagagtataggcacaggccaccacacctggctaattctttatttttaatttttttgtagagactggattttgcagagactgtgttgcccaggctggtcttggactcctgggctttagcaatcctccctccgaagcctcccaaagtgctgggatacaggcttgagccactgctcccggccctttctcatttttgatactgkaatttgtttcttcttttttcctgatcaatctgtatagagttttatcaattttattgatttatttaaagaaccagsttttgggttcatttgttttctctattgkctgkttttattttttcattgacagccactctggtcttttttatttcctttcttctacttactttgagtttactttgcccttcctttttatatttgttaatgtggaaagcgagatctttcttttttcttaatataggcatttcatgcaacaaaattccgcttaagtgttcctctagcagcatcctacaaattctgatrtgtagtgtcttcattcagctgaacacgatcccaatggtgggagctagaacaattggagcaacaaaacaaataacacagtattggcttacagcccaaagcataagataaatatccatgagtctatcctgatagaaatagatgattgagtaaataactaaaggaggacagaagagctgagtctcccatgcagaacaactccaaatactttatgtagattctctgccagctaggagacagagcctagctccctgctcacgtgggagctgtgcctagagacttccatccaaagatgatggcattggaaaggggtaatgagtgactgtccagagaagaaggctgacaaacactacgtccgtctggtgatgaaggtcaacattaayggtgataagccatgttgatggtgggcacccttgggtgggatgtgatgagaatggattttatctctgtagtcttccttccaaaacccgtaagcccatataatcacaagaaaaacatcagacaaatccgatctgtgggatattccacaaactacctgcccaggactcctcaaaactgtcagggtcctcaaaaataaggraagtcagagaaattgtcaaagccaagagaagctgagagagacatgatgactgaacataacatggtgtcctggatcctaaagagagaaaactaaaacaacaggaataaagtatggactttagtttaaataatgtgctcatattggtgcattaattgtgatgagtatgccatactattgtgagatgttaatcttaggggaaactgggtgggggtagatgggaactctgtgctatttttgaaaattttctgtaaatctaaaactattctaaaatgcaagtttcttttcttttttttttttttttttttttttgaggtggagtcttgttctgtcacccaggctggaatgctgtggtacgatcttggstcactgcaacctccacctcccaggttcaaatgattctcctgcctcagcctcccaagtagctgggattacaggcacccaccaccacgccgggctaatttttttatttttagtgaagacggggtttcatcatgttggccaggctggtctcgaactcctgacctcgtgttctgcctgcctcggcctcccaaagtgctgggattacaggtgtgagccaccgtgcccagccacaagtttcatttttaaaaaaatctatgggatatgttgaaaagaaatataaggggaaaaataaaaatttgagaattagaaagagacgtatatatttctaaaattattgacattaggtatcgtttcatttaagtagtcaatttaattgtgttatgtaacaactctttttaaaagtcaatattataatgtcaagacttatatattgaatcttatgatgaaactttcaaataacttgacaatgttgcaaaaggaacagagtttttcattccaaaaacatttaggaaatgaaagaaaagtcatttgagtctagtggtagagaggacctgagagaagagattgcacactccaccccagttccccatggccatttagacagggagagatggacatataagtgattcttacagctccctaaacttgtgtttgaaaactggagaagggataagaactctagtgttgctacctccctggacccctacctggatggagtactggtgaggcacgcatccaattcagctgatgatcccwttttttttttttttttttttttttttttcagacagagtctcactctgacaccaggctggagtgcagtggcacgatctcggctcactgcaacctctgcctcccgggttcaagcaattctcctgactcagtctccckagtagctggaattacaggcgtccaccaccacgcccatctaatttttgtatttttagtagagacggggtttcaccatgttggccaggatggtctcgatctcttgacctcgtgatcctcccgcctcggcctcccaaagtgctgggattacaggcgtgagccaccgtgcccagcctgatgacccctttcttaaggcttcctcagagacagccgagagccaggatgatgctgcataaacagcccaagagaactagtcaactcaggcaatcaaatgccaccattccagcagagattgccagcactagcatgaaactgaccaaaccagagttggaataagactacagagactccagcatctgggggagccctggtctcttcwcgctgaaragcctgaccactgcaacagtcctgtgtggctggaaatctgaggtctctggagaaggcttgaggaaaccacagaggctctctcggaatggcacgattgcattttacgttttctgaatgtgtggggcacatatgctcttaataaaatattcatatctggaaaaaacctaagtaactgcctataaacatgtatctatctaaaggtactaaaaagaaatgtttttcaagttattaaggtgagccgatcctgcttacgttgttagttattaaagtaagtttaatttaaattttattatttttataccatatatattctatctgcaaaggaaaggtaacatcagtgccagcaaaaccctgaacctcatttcacgattgactaacactcaaacactcaccacatccatagatgattctgtgcccctgttggcatcaggagctgtcctgtgccctgcaaggtgtttatcagtattcctggcttctacccactatacgcaagtagcacccgctccttgagtggtgacacaaaaacatctccagacactgccaaatgtcctgcggggagcagaatcaccactggttgagacccagggtctgaaaactacaaccgtagaaatccggctcactgcttgcttttgcaaataaagttttatcagaacacagccgtgcccattcatttctgttttgcctgtggtcccttccacaccacagtggcagagctgagttcatgcaacagagacagtgtagcccacaaagtccaaactatttaccatctggcgccttatagaaaaagtttgccacccgtactctagtttctacctcctaagtctcttctagatccatatttacctgtctcctgcctcgctgttgccacccagcccacccggatcaactgccacctggatttctgcaaaactcccagggcactcctgcctctggtctggctgcccttcagttcatgcttcacagagcatcctgggggacattttccgaaagcacaaggttcatcatgtcacttccctgtttaatgcctttgggtggcctcccctgtgcttaagataacatgaggccccttcacatggcctgtgaaattcaaagattgaccccatcacattccagcctctaaaaggtgtccatgagagacttccttctgtcctgcaagcagggaayacaacaaaacccagctctgacctccagacacgaatattcccatggamctgtgagcctgggtttaccctctgcaccgtgtggcatggcatctcacctgcgacaggtgctccgccagaygtcaaacagccacacagctgcccctgtgctgttagcttctcatacatattcagttaatgtgtcagytactccactcaaccccaacattaaccataggagactctaaaatttagtgtttgytgaatagtctcygcagcagggattttccagttttttgataatgacccaaaataagaactgaatatacaaaacatcgtaatctagtacacacatgcttctgtgtgtgtgtgaacacatctgagacatacatttcatgatagaatatttacctttaggccgggcacggtggctcacacctgtaatcccagcactttgggaggccgaggcgggtggatcacaaggtcaggagatcgagaccatcctggccaacatgatgaaaccccatctctactaaaaatacaaaaattagctgggcatggtggcacgcacctgtagtcccagctacttgggaggctgaggcaggagaatcgcgtgaacccgggaggcggaggtaacagtggccgctgcactccagcctgacaacagagcaagactccatctagaaaaaacagaaaaaaagaatatttacctttactagtaatgttttttattgttttctatttcattgtttaaattttggtcacaactcactaaattacttcaattaacctactaatgtgttgtgatgtacagtttgagaagcactgccctgcagcttctagcaaggtgacttgatgaattaactaagtgatgagctggttatgagaatatccaagaaacagttggaagggcctggatctttagctctgggtctttggactttccaatttgttagactttgtggcaaatgacccgatcctccctcacaaatgccgaatccctcaaaagggccccggcagaaagaggaatggatacaaaggtrctgttgcgagtgtgtttacccaaatccttgggctcctgcaaaaaccctgtggattgacaacttcaagggagccagaaatgaccaaagattagctcaaagtaatcctccagaaaacgactgccaagagaggctacaaatgtattcccccaaaaatgagaatacatggataaaagcagaaaaatttttaaaacttagaatctgtaaaaaacagcgtggggcactgtgcattggttaccactgaatgcacggctgtagggatccggtgggctcaagtgggatctggtgggttccggtgggctctggtgggctccggtggggtgggcacaaggtaccaactaccttccatcctgctgaccttggctggccatctcaagttaggcttaccccgctggccagcctaactcctgagcagtccccaagcttccctgccctgtccccttacacaccaagatttgactttataaattatcaactcacattccccaaatgaagcaaacttaactttgacctgttagtagataccatatgcctcaaggtggtttgtaaacttgaatgggaaaaaaatttctacctttattttcaatactttctaacagacatttagaacacttgcttcaattataaacgtaggcaagaaacctcagtggtatttgctgttcctgtgactttgctgtcaatagaaatcacaaatgttttcacacattaaagctgttgcaggtatctcgaaatatcactcgcactcatcactactccgaaatcgtggtagttgttagatttataccactcgatcttatttaagatattaataaagaagcacatatgaatatacatcacaaatgtggcttttgatatattgtcaccttatttcaatagaacaggtttcctttgtgactcttggtacttcattcatttaaaaacattagtctgagaaagggtctgtaggcttcaccaggccacaaaacggcgaccgtgaaatgggtcacaacagaaaaaggaatctttgatgaatgcctccataggccaagcaatttgcaaaaaaaattatttcttcttatttcagctactttattttttaatttttaaaaatatttattgacttgtattctccaattcaaaaaataatttgatcttattataacaagtgaaacaatgcaagraaaagatatacaaaggcagtctatcttggaagtttgatacacacatcacaatggactgcataacaacatagattcaaataaagtgttaggaagccagctcagagaaagacagtgaggctggcaggtagaagaattgctagtgatggtgtttccattgtggaccaagtaagcagtcattcccataagatgtgagcaggcgccctgtgcaaaaggattctgtggtcacagtggatgagaaaatgctcggttaatcaaaggcacactgcattttttttaatacactaaaatgcactgagaatctccaaaggagaaaatataatatgcaaggtttctgaaatacagttgtctacaaaatcttcctctctcctccccaaccctccccaagaactttcttatattccccagaacatggtttgggaattgctgaaacagggtaatgtaagtttcatcctgacctcagccatttaaaacatgcagccaacaatggctacatcttttrtttttctctccttaggtcagtaaggagatatgagattttttgtcttgccagaattctttatttatttacattaaaaacgagaaaaaatatataaccaccaacaaaggtttcactcttttttttttgtactaatatacttcagactcagcttttaccttgctggagggagaacttaattacttacaggtttttctagaacagtccttagttcaaccctaccacagtttacactscagcccacattacagaattccactggcatttggctctccagtctccctctttagagtggtaatacagtgctctcagggttatacacagagaagtttagaaaataccagccagttgagactagttggcccctccactcagaaagctgcagaatgcctttcacccagccacaccaaaagatgtaaggagcaaagagctcccaccagccacgcacacaaaggacgtgtatgctcacctggaaatcrgtggctaaagaggtagcacccttgcggggaccagaagggacccaaagaggcctgaggaaagtgaaggaaactagaaaagacagcagagtctcactcctataagtaaacttcaaacttgcttttaaaatgattagcaacacattctggtttgtttatagtctatacatgatctcgcagagtcaagaaaagacagacttccctctgtaacctttccacttgcaccaatgatttccagatcatcggtgcctgaagccaatcgcctgcttcaaagaggcatcctttgcaagagcacttgtgcgttcagagttccagtggtaccaaggatgacagtgaggcttttgatagtgataggcggcttaatgaagagagccaggacagcatgcttgctctgcccccactcgttcacttgctccctaacagtgaatcgggggatggtctgaggctctccactccctaaccagagcccactgagcccagactgccacctcgaaaatgggtgatgaccatcgtttccttgaccagacaggcctcgacatcagcctttctatagaatgccagaaatggcagagcctgcccttgggcgaaaacactttttagataactaatcagcaataatgctgcaactgacctgcctgcaggcttcagcggctccagatctaaattaccctaatttttctcccccaaaattaggcataatattataatttcaaggaacgcaagagccatttctcccatcattggataccaagctcaagatgttacaggaaaaagaaatagcttttactgctgatatgagaattttaaaagagagacaagtgtgagcaaacaaaacctgtcacatcaaatactctggcaaaaaaaaaaaaaaaaaaaagctagaaaaaaaatgccagaaatgctgaaatctaaataaagtcatttatttgttattttaaccccttcactgtcagagctactctggcataaggctagttaattctccagaggtgagctttattaaggacagtgcccttattcttgcagccattgttttcttgtcacacagttctcttgattatctggtcccttcaaggggttccacatacaaatggggtgctgttgatgctccttgggccgtacctccttttaaagtatgattttttcagagaatttgattttatccartttccaccatgctaagcaaaaacactagactgtgagatcccgaagggcagcagccccgtgaccctcatggttctggcacatggaaggtattcaaagcatgagatggaaattgctttttgaactctgtgccttaggcagttaacatgcaagcaaagataagatgccttcggcaggggaggctatgacaaccaacgagaaaaatggaaaaacaccaattggatgggtctgcagttgatcacttgctcttccttggtcaagttcatgagcctgtctcctgtttcgaggatacatgcttttataaatgttaaataagctaacactgctgaaagggcattgctaatggaggtctgtggaaatagagggaaatatttctaattagaaggtatggattgggcactcactgtgtgccaagcactacagtggaccctgaaatgagtcagccacagactcggtcctccaagatccccgctcctccagctccattcattttagcccgatgcaatgaggcttctttctgccttcaggaattgcttgggcaatggttcccaggaccttctgactcagaggattccacagacttttcagccctttcttctgggaggtctccgtggccttcccaccactgcctcagtcttgtggtggtgccgctccccatgggggcttctcccaccctcccggctgctcctcccccacctcctgagcccacctctagaggctgggtcatctcgggctgttcctgcggtctcttctgctctctaaatacccactgtccaggaacgcccaccctgcggtggcctcagctcccacctacaagcccaggacttttctcccaagtcctaatcttattaaatatgctgcctgcctgcaggctgtattcaccagccatcttctcgccttcgcccaggagttgataccaccactgagagggcactgccaagcacctatgcagggaggcccgggtccctctgggccctgtccgggccacatcctcagcatttctctccgtctcaacagctcaagccctgtggtacctcttgctgagcctctggggttctcccagaaggccagccccaccctcgtctgaccccacagtcctgcctctccagtgcggctagactgtcttccccagctgacgcccatctgcggttccccacggccagtctcaacagtctcctgcctgcacccactcctcagccttctccattggaggctcccctcctcagacacacaggcctgtctgctgccccatcgtctctgcgcaggctgctctctcggtgtccctggcccatgcccactccacgctccagggctcagcctcctctcccgctctccaccccacccttcgtctcctgccctccaccccacccctcctttcccgccctccaccacacccctcctctcgggctcctgggcacccccccgccacctgcgtctcctgtcgtcagcaaaatgcactatttgctcatccagtgcccacagtttgcccaccggacggccctgctaggtgggaagctccttgcaggcaggaaccccatctccttgactttactttggaatccccgcagcctcatacggggctgaggcaggtccttccgtaaaatggaactgaatgagcggcgcttaatccatccgccaaaggccagtctcccttgggttttcaacaggtaacatgagcttttaaaaatgagtcttgttaaatgaagtgccctgattttcaaagttatgcccacacagaacgacagggcaggggctcccttccagaatgacagagccctggggctcgtctgaccacttctccacccccagattcctctcatcacccgatgcctttactttgggactcttccaggtcgttcctcacctcgtgcagcattgctgtgagtgggcgacaaggaacctcgtggtctccgtgtgctttgcggggaccacctcttcgcaggggccgccacctgcctctccggcgctgcatccttagcatccccactgcccccggatctccttcagggaggtgcggcggcagagcggccccagcagcctcctcctgtggcccaggcgcaccaaggcgagcgcggccacgagttccggcccagcgccacccagactctttgatgtgggtttgtgtgtgggagagtaaaagatgcacacaccctccgcaagtctagaatttgtggtttttgttatctcacaacttcatatttggaagaagtattttaatgtcttatgagttgtgaataattatgtaattctgccactttctcaaaaccaagatttttcaaacggactgctctagtctggagctgacatccttaagagaactttgctttttttcctgtgggttttaagcaagagtgtgccaaatgaattctttcgtccgcttaaaacagttcattagggggaaccatcctgtaaaaggaaaggaaaggaaaggaaaatccttccttcttcaaatgaattctcaaaaattacttctgagatgcaaatgctgcctgagtgtttgagctccgtgagagagtccacttcccaacttgttttcagtctgctgttgggtgctactgaatttcttaaacattgtgtttctcccttatctgtgaattagccatgtgttctttggaatctcttcctgggtcttcgttattcttcctcagttatttaaraacctagggaaggcccggcgtggtggctcacgcctgtaatcccagtactttgggaggccgaagcgggcggatcacctgaggccgggagtttgagaccggcctgaccgacatggagaatctaaaaatgcaaaattasccgggcgtggtggcgggcgcctgtaatcccagctactcgggagactgaggcaagagaatcgcttaaacctgggaggcggaggttgcagtgagccgagattgcgccattgcattccagcctgggcaacaagagcgagactccgttaaaaaaanaaaaaaaagaaaagaaaaagaaaaaaccctagggaaagggtcacgaagactgcatcatcaaatgacaccatgaactcctcaagggtctacccattgttttaacttactgcccaaaaggtacttctcattcgaatagcccccattctacagtcatctctatcaatcatcatgtcacttgatcatgacatcgttctaagcacctgtaacatcccagaccctgtctgaagcaccaggaatgctgggtgagcgggacagaagggaccacagatcctcaygttgccttatcaagtttagactctagtggtcccgatggctgatctcatgacattcaaataggaggcgatcatttccttaaatacaaacacgagattgtcaatagttaggatgtgcttatttttcctccagggcataagattttttttcttgtatgtatttcatatccctagctggagaaatatcaaaagaatctgaatatcaccatctggaagttgtgccatggactccagtgggcaggattcgagctgggattctcttcttcctctagcagtgtatttcttctgcttaaaatgagcacaaacacrtctaattccctaatggaccaactcagacctaaaagtctcttattctttgcccgccttcctctacccacatggattcctgggattctctaaatgcagatggcaatggggagggctggggattcccatcaaggatatttgatcatcggtgacttcacttaaccaataaatcaaacgtgttgaaatacacacatgtcagaaatgtggtatgctgttactcactcaaaagtctgttggtctgtcttggttgcgattgggcaatgaagccctagggacttatttcggcttcaatagtctgtaaccctcaatcaatatttcgttaagtgtyagtattcattcctagtatttccccaagtttaacttgttccttttgaaacgactggtattcttatgagccagaagactgttatttgaaaatgtttcctttttttttttttttttttttttttttttttttttgagacggagtttcactcttgttgcccaggctggagtgcagtggcacgatctcggctcattgcaacctccatctcccaggttcaagtgattctcctgcctcagcctcccgagtggctgggattatasgcacccgccaccatgcccagctaatttttgtatttttagtacagacggggtttcaccatgctggccaggctggtctcgaactcctgacctcaggtgatctgcccgccttggcctcccaaagtgctggcattacaggcgtgaaycaccatgcccggccaatgtttccttttttaaaccttcattatatatcactttcacatttagaactctcttcgcctccatctagaaatattttcgttttctctggatgtgcttctgtctcccgctggacaagcctggcactccgggaagaggaccctgtgtatcacgacacctggcacacagaagaagctcaataggcactgaatgatttttttttaacattgargttgtttttagctctcccctattagccgttagttagcagttcacattgtatgtggagtctgtatttataatataacattagttctgccctaaaattccacaggacaaattccatttggaaacgtcctctaattgtcatgcagtggttctgttcaaactgcgggaacatttctaaatcccacagctctaacaggctgcctgcccattacagaaggagacttcaggcggaaattcaaaacacttgctactgtgacatctgcccagcagtactaatttacatccatttgtatttattattgtatagtttggratgtaataagatgctgccatcacccccacaagcctctggaatactgaggagtggtattgcatgtcatgaagcacgcaggctcttcgagtttgacctctgctttgaattcccacttgacccaggatgaggaagtctgactgagcagcggtttcctcatctgtaaaatgggtataacaccagcacctatcttgctggattggcacctggaataaatgagaaagcacaggccaagccctccagcattggacacagtcagcatgtaattaatgctagctcttcttattaaattcctttagcttaaagacaaagtaatcagagacacttacagaattacagaagagtttatcatgccgttctctttgaggaaaacagttaagcagttttaatccattttataataatgtcttacataatccttactcagagctttaatcaaaaaggttgtcttttaataaacaagattcacatttagactctgtctacacacacaagccagttttaaatgtcacccagattaagtcaaacaaccgataattaacaatgttttacatgtaactggttttgtttgtggacccagtcctaaacatttttttaccaagtaaccttaaatatgtcatcagatgggtttttagtagacatatctgaacctaattttgtagcttaaaaatagtatattttattcactttttttaatattaaatatgtaggatattttaatacttggccaattcaagtgttgataagtaacatctgtcaacatttacaatattatctagctcagttatccagaataaactgagaatcttctggatttttaaaacaattctcaggccctgatttactaggagagtttgggaggacctttatgcagacaaacaactcatagtttaagttggcttccgctcctttctaacacaaagataaccgcgaggtggaaaaatatcactttgtgaaaacgacatcttagcaaaacagatctgtacaaggcagaactggacaaaatatgttgattcacattaccactgacttatatcagacattctatcattttatctgcctcgagcatttatcaaagtaaactgctgcagagtgcaactgcctccttgtcggccgggacaggtgttaccacatctatcgcctcgcctgcttgtaaatggggatagcccgttcctacagctaatcctggcaacacaagctcaccttcacacagcaggattgggaggctctggaaggttctaaggccaaagacagagccaggtctgcttggaagccatctgtgatccccgttcctacccctccaccttgctcatgcctccctctgcagcgaccagcctggcaccaaaacagcacctgccaggggaacttgaggatttggctggcctggggctagagctgtccattcccaccaagaggaagaggcccacaaccccagtggcctctgaggccagcagagcctgtggtgccacaagggaacagcctgtgagcctgtcctccactgcgccctgcgcttctgactcagactaacacaccaggattttccatttcaacagcagtgtctgtggtcctcttttctaagtgaaagagtccaagctaaggttggctagagggatccttgcagctccggagcaggtgtagggctgataccagccctctgctgttatttgacagcttgcaaaatgtacaaactggccagatacaggtgtgtgcttgcatgtgtgtgcatacacacacatatctgaatatatatgtgtgtgtatctacacatcatactaataaactaataacttccatgggcaataaattttcaaatttcttaaggattcagataaggagaatgtatataatcaacacattaattattatgcatacataaacatactaatactcttaatacgccctttgaaaaaatatattcaaccagcttaatttttctaattttgtttttgttaaatcctgttttcttattaactattgattgctaagcagcaggcagtgtgctaagtatgttacctggattatctggttaatccttccaatagctacacggtgaagacacagatgtccacatcttctgcagataaggaaactgaggggtaataataaataatttgcacaacacagcacaaagctgaggagccaacactggacctgacgaagtcccattctggaagccaaactcccaactgctaagctctgcttgaattctcattgagcatctygcttcttaaaagtttcaacaactcagcagtctataatccaactcgccttctccrcaatgccaaaaggtagaagtgacactttcttttttttctttcttttttttttttttttttgagacagagtctcattctgtcacccaggctggaatgcagtggcgcgatctcagctcactgcaacctctgcctcctgggttcaagcgattctcctacctcagcctcccaagtagctggggctacaggcacacaccaccacacctagctaatttttgtatttttagtaaagagggggtttcatcatgttggccaggatggtctcaatctcttgaccttgtgatccacccgcctcggcctccgaaagtgctgggattacaggcatgaaccaccaagcctggcagtgctttcttataagggaggtgctttccctatccatgagggtatttagggaaccatataaaaatatatatgtaagttgtataatggtaattgatagacataacacagttagttaaaaatggcgtcaaacaatagaataactactttccatccttcatagattcaatactcatttagctgaggtttatcattggccaacatcagggttgagctctgggagggagaataaaaagtagtaggcaccctcttctccccaagaactcacactgatcatacagataagatgtgtgtggtataacacttgctttccatgaaaataaattgattaatcacatcgaaaatagaggaacaaataatgaaagtgtttcttagggcaaaaaataagagcgctgggggttttcataccctaaaggtagtcctttttctaacaaccaaagaattggccatgtctactcctgacatatagccgtcctcctttgctaccaggaataaacaacaatttgactgagccaaatagcagatgcaattttgcatgaagctagtaatactgtttatgctttactatttttaatatgctataaaaactatttgtcttttcaaaaaaaaattttttttacagatttaatgccactgccttaactttaaaccaatggggtagacatttctccttctcttttcaggggcaaattttggaattattttaaaatcagtctgatgcctcacacatcacggctgctaaacttgggtatttgtttttcagtgcaatgagcttcatgctgaatactgatttgaagtgtggttcaccacacagacttaaattgtccttcccacaactttatctgagaagcatgacaacggtgacaatcacaggactagttttattgggtaagactattctatgtgcaatttattctgacaggctccacaatttttaagtgcaattaaatcctaagaatttgcccananaaaaaaaagtctaccactttttaaaaaaaattttttttgaagaaagcagaaaaaacagttgaattgaacaactaattactaactggttgctctcttgaaaaaaaaaaaaagatatttgacagagcctcaaaatcgatttcattatctagacaggcaactttctgggtctgagaaagagaaggcttccaggaggtctgcagccacctgcttcagccactgctggtatccacatcttcaaagcggaggtttagccacacccagaggggggaataacacttgcagaaaacaacgctcagaaattggcgtcacctgattccccacagcagagcagaccagctgtctcctgtacaggtggaagcagcttgcacgcttcctgccatccgcatgctcactcctccctcacagtcccagaaatggaatcccaagaggccgctcaggcaagccagatagagccacccatgtgatcaagcattcagggcatgagggcccccactaccatggcccggaaaatacatgcatcaacatgactcatgtcatttgcttgcccttggtgaatttcacgttgcatttctaacccgaagctagggtcgcrattgtctggggcgtagagtccctaccacttctaggtattccacattcccagtctctattcaacaagaggctaggctgacactgaagcagctatccaggttattcttcagaaatcagatatttttaaagtgatgccaagtkacacctaacatcatagaatattctcttcatgtgaacttaattcagtagaaaacatcttcggccagacacctgcagctggcataatctggctatctggtgcctgctgctccctctacccttgctgctgccccgacctgccccataccccagcccccattggggtcgacggtttcccagagatactcagccttttggtgctcctctctcctcctggtataccccatgcattaagcattgatcctcccatcttgtgtgcccccaagacatctaccactgttaacactaaaatggccttgcctgtctcacccaatttggctccgaactcattgaggaccacctyacacactccccagcacctcacacagttactggtacagagcargctcccggggatgtttgctgaargtctttttttcccttctgagctgctaaaacaacaggcattaaacagtcacctgggccacattgttgctgtgaaatgtccttctctgcagatcgtaagccccgtgacgtgatggcagaaaccgcgccctccttttgtgccctaatacctgggccagtgctctgggcctattagatgccaataaatgtttcttgaataaatgaattaaagacaatactgatacagacatcctgagagaaagccgaaaaggtctaaaaatgaaggcattccaacatccatgtgcacagaacattgggaaagctgtccatcagcgtctctcttttgtgacttcctattaaggtgctccgcagaacttgaactgacctattgcagtacagcacagtactagggacacaggccaggtggaaagagattacttcatctgcttgccatgcaaagcagggctgaggatccgaggcctcaacatggagagtgggaccccagggccctcacccctcccttctcaggccatttgttcctttttcctggatgaccacctcccacctgtcaccccctgcctttgccttccacttggccaatgctaaatcaccctctcagactcatctcaggtaccacctctccaaggacgcgttccctgacccctctgggcctggcctggtgtgaatgcatactatactgttaccctcactggacagagacactctcttcctttttttttttttttcagacagggcctcactctgtcgcccaggctggcgtgcagtggtgcgaacctccacctcccaggttcaagtgattctcctgcctcagcctcccaagtagctgggactataggtgtgctgccaccacatccagctaatttttgtatttttagtagagacagggttcctctatgttggccaggctggtcttgaactcctgacctcatgtgatcctcccacctcagcctcccaaagtgctaagattacaggtgtgagcagccacgccaggcctggtcacttcctttctgagtatctccaccgctactgagtgaggaccttgagcagtgccaggatttgctgttgctcctgcctcccaccctctcttgaatcctgctccctttccccctgcctgggcctttgccacttccccagattttaattatgcaaaattaaatagctgcttcataggcgaacagctggatacaacaccttgcagtcttcaggggaaatggtgcaagcataaaaaacaggaagagcaatttaagattaaaatactgctttgaggctggtgtgggcactgtctccaacagaggctgacacttgcctgctggatttaaacctgcccatggtcaggcatcaagccccccatgccaggcctaggggagacagaggaggtgagatggccacaccctcagccacctttcctactacttttggcagctccacgattggcaccagaatggcacttattggagggttttctccctcgcagccctcctaagaatcgcctgctgcctttcctcctacccattctaacccttcaaacccaggggatgctgggcttccgaccctcttccccttttataagtgtaaggtgctatccctgggaggccaatgctgttggctgcacacttatagaaccccaagttatttccaggaccccctaaaaatgtgcaatgctgaaacaggactgttttactttgagcaccagatgaattctggaacagtcaggtgcaaaactgaatcctggcatggcgaatcatcttccccatggcttccattttaatttcagaagtgcattagtggaggctgagaacttgcatccaacacaacatgaaatctaatgaggaattccgacattgcctgagagtgcacacagcccatgtgcatttcatttgcctgtatgtgccctataaaaaattcaaccactttgggaggccgagatgggcggatcacgaggtcaagagattgagaccatcctggctaacagggtgaaaccccgtctctactaaaaatacaaaaaattagctggtcgtggtggcaggtgcctgtagtcccagctactcaggaggctgaggcaggagaagggcgtgaacctgggaggtggagcctgcagtgagccaagatcgcgccactgcactccagcctgggcgactgagcaagactctgtctcaaagaaaaaaaaaaaaaaaattcaaccaaattcaaacgcaccatcttttataataaaaatctctctaatatttaaaatrtacatcatactcccatttaaatcacaatgcttactatttttacccaaagtgcttctatttcttgaaagagctgatgtttactagaattgaacatgggtcatgcaagaagcactgagtcaagattggctgggactgcggaatcctctctctcctgcaggaatcccatccacacgctcctggttcactttcatcatctgaaggacctcttcgtacctagattctacttgttatgtgcagtttattttggttctaaaggtcagaggcaaatattaataaaggcatttgcagccttttaagcttggaagatattcctggcagggcgaggggcaagacatggcatyagaggtcattcaccatccccggcactgtgtcccgccggccacaggacccctgcattcactcccttacctagtagtaggatatatggaaattagcctgggaaatgttgtatgttagcatagttcatgtttaatatactaaagcatggcctttagtccataaggttttatgaattacccgaacatatacaagcattctttaaacaaataacacttaaataccagagcgacaattaaaactgaccaatggaaaggatctggaaggccctggaacaagtgccttttcttttttgttgtttttgggtttgtttgtttttgagggaaacaggagaggctctgaaatccaagtctacggtctcttacatgaaagtgcaaaactccaaaaagctctaaaaaccaaaagttgttactcaaattttgcaacccaccctgacatgcggatatctaaggtcttcctgtcactccacttagagtgaccattcctatgttcmctatccaaatgcccatgcaattgggaagaaaggaatcccaggctggagaagtctagaatatcccattacagtcttgatactgtattcattttctattgaaagaaaaaaaaaatctcaattytgaaaaacatccaaccacgcaggttttgcagactggtactattagagtctgacataaacaggggcctggcatgtaattaagtgagaaggtacccaagctacattgaagaaggacggtgactcgyagggttaaaactgagagcctggctctgatccaaagctgtgtttaaagacgtgcaaacataccacaccggttcaccgatcatcagccgaagctccaatatcaattctgtgttaaaccatcaatctaaagtggatatttttgttattttgtttatcttttttcccccatcaggacaccyagtgaaccaatttcaaatgacacctgaacctacatatttttcttaaactactgaactggaacaaaatcaaaacatcaaaatattctccaaaagtggcgggaatggaatcgggatttcatttcggtttaagtcccaggttgaaaagacacaagatggtcaggtcatctcatggatggaaagagcttaaaccacccayccatttttgaaaccttgacctcgagaagaaagagagaaagcttttamgtttttaaaacagctggaaaatcataccatctgtgcatttttacccagccatactccaaacccagctctctattttatatacctgtttttttcttgtgattatctcactgttccttgcaagaatgagccgataatttgatactccagagggaagttcaatttctcagctgaagatgaagactcaggggtggcctccttcaggaattgtaaagttcaggggagaacggcaatccatttttatatgctaatactttgtatttagttaatttgattaagtggtaggaaatgataccttgctcrtagatggatcgttcgcacatttgcagtaaaacctaaatgccaaattttcctccttcaagttcttgagagagttattttcatcactttcatttcttcctgtaccacagccattgctcatctctttgttccctgaagagctttaaaagtagctgtgttcatgtcatttttatcttgttactttaatcatgtgcttattgacaagagcggaatttgtcatcctcttccaagcaagccctgtcaccagtttttcagcgtgattcagcataagtcatgctcccctgaggaagggacactaacccaacccacccaggaacacaaggacgtcactggagaggaacttttcccaaaatccccaggacctgccttggtgcagggcaacttcaaaggagagggtcttgtgtgaccaggaacagataacctgaggaggcatcatcctttccaggagccttcgccatgacatggcagcactgttagaatgtcttgtttgtttctccagagtctgttccttttcttaggcaagtccagaatatccaaagcagacagaactgtttggatttctggatttgcttttgtttgtgttttctctactttctattgcagtccaactgagtcacattcattttttaaacaacttaagattccatgtcatttaaatagtgttatgttgtttgagaaagtccagtggcaggtccggtgagttcagtgaagaagcatgcccactgctggcctgtggcttcggtgaacgggtgcattctttttttttttaagacaaagtcttgctctggcaccctggctggagtgcagtggcactatcttggctcactgcaacctctgcctcccagttcaagtgattctccagcctcagcctcctgagtagctgggattacaggcatgcatcaccacgcccagctaatttttttatttttagtagagacagggtttcaccatcttggccaggctggtctcgaactcttgacctcaggtgatccgcccgcctccacctcccaaagtgctgaacgggcgcattcttaactgtgtttctccttccgacttgctgaaatatgagtgatttataactcagcatcctattgactgacggatggcctggtttctgtgtgctgggtgctgacagagcccccagaagtgcgtaaaatgatacttgctcaccaggggttcccattattttctcctcaaccagaaacattcccagagacatgccacacagtgagaaataaacatggtgcaataaaacacagacggtaccgcgaggatcctctgtgaggagcaagaggtggagacagtcccaggggagtccacagtgggtggggtcaaagtgggtctgagtggtgatgggagagctgggtctgagaggtgccatctggacaggtggaaagaagggtggaaggcatttcaagcagggaaaaggaggtaagggaagyccagagacagtgggggaaaggctggttagggagtcagggaagaactcagtgcagtcaaggaggaggattttgaaggcagggctgagaagtgcctgaggttggatgtggagttgggagtcttgacctttcccacccaggccttgatgtatcccagctgagaagatgcaaggtcagcaggcaggctagggtggcagatggacamaaaaccagagaccagggaccaaggagtagatccctgcgacagcaggaccaggacaggcaatgaaatttgagaaaaatttcaaaataattgatgactaagagaaagcagtctaaactccaatattcagtttttgcacacctatctttaatgatctccttacagttagaaaacagtccattttccccataatcggtagtcgtttcattagcatctaaattataattccttaattataagcctatcacctattctgctttccaaaaattaatccagaagctgtcaaatacaaacttatgtttaataaaatgaacatctgtgatcacacaccaggagcaaaatcctaattgttctaaacccggcactttgctttgacaaccaagtaccttttttttaaatactttatttctttaaaacacctgctttctttacatactgacttttaaaggaagagattaaattttattggcaggaacagaagttagtctctaaaatagcaaaggaagaactatgctttatagaaaagttgcctgctacattaaaaataaaccagaatatgaatcaaaatccacaaatccaacaggggccaatccccaattttcccacaaagagagccgacagtctgataacctcagctctttggaattaggctgttggtggcggctgcagtccttgttccgatggtagccgcaccaccccagcccaggatggctgtatttccattagaattggctgtcctgccctctctgccttcgccaccccccttcgcccaagtccggttattcagtgagttataatttggcactaaaactcaattaagctgaaacgttggtcatacgtggtgtttttcccagcaaagcataatttctttgacccattttccaaatgtcagtagatcgattttaaagcacagagaggtaaaagtytgtttaaaaatccagctcgcatttctagaaactggctggaattttttttttttaatttcaaataaacagtcaggatgtggtgttactatattaaagcgcttcaagttttcatagcgctcgtcaaacagagacctcggaacgctctgcagacattaattaatgttcgctccggccctggaagccatttcaccaatggaaattccgatgagaaaggaagaaacgaggggttcaaggccgcgccgttgtgagtccgctgcggaactaggaactgaaaccccgtggttcccaatgagccagcgaaagtctgtcgaagtattgagcacccctattgaagactgtgggagttttggyggcttaatgggattgtgttcggtccttcaggctctcctttaaaagattccatggcaccaacgagactccaataaaagggcctctctaattgctttctgactttctatgaaactttctaagctatgctgacatcctcgaatacaactatggaattaaagaggagagaaaggcgaggcacagtgggtgcgcaaagaaaaagaggttctcagcggagcgtgtgtgaggcggggggttacgggggaggggagacggggcgggtgtgaagtctgtgccgggaaaagaaaaatatgagtgttctcttttgtgtgcgcacaaacagccgagcgcggggaggtcgggcccggggtcacgcggctccgggctgcagctgccgccgtggggcggggggtcccaggcggccaccgggcgtcgcggccgcctgcggcatcagcattccggcggcgcgggcggccgctgtcctcgcgcgaccccagcccgtccagagcgcgccccggcaccgaccctcggggcgaggcgagcgcagcccccgctggccaacaaggtaagcgcggcgcggggagcggtggccgggagcctgggcgccaggcgacccctcgacagggcgcacggaccggttctccgccgcgcgggtcgatgaccgacggggaggcccgagtctggccccgacgccctggcccggtgtccccgacgcgcctggagcccgggagggaggcgcgggcctggcctgggcccaggaggatggagcccgactcagggccgtctctccccgcttgggggtgctcaggagggcccagggtacctgcgcgggcaccttggcggcgggtcaccctccctccgagccactccgtccgtgggcagcggccttaccaggtccgagccggacgctcagcgttgccctccgcgagcccccagcctcccctcgagcgccgcgggagccccaggtgcacacacgcaggcctgggccgggcctccaggcctctgtccttcgggcgggctgggaggtggcctggcgatgcccgccgaggggtggagagggcgaagccagggcggcgtcggcgaggccatcaaaggccgggggtggcggcccgccgcgttgcccatgaccaggccgagggcatgaaaggatctttatcctccagtgacattgccaggccggcgcttttctgcggcctccccctcccgcggccctaattggggccggctgctaatgtgattaaaggccagttaaacgtttctccgagcagggggtgggaagaggccgagacccctgccccctccccagggtcacgccaggcccgtggtcgggggtcggcgacggtgccagcctgggacggcctggccaggtgcctgccgattgttcacccccaggcgggcgggccggcgggctcccggggctttatgtaagccggtgggctttgggcccgaccggatttagggattcttttcgcacagtttccattttctggcctttggaactgcgccctaagccctcggggccctccccctccggtgcccggcgctggcggggcccagccacgggggcgggctgggggtgccaggctttgggggtctggagggcctgaagcaggtcgcgttgggggtctcactacctaagacagtgactcaggacagtgggacctgggtgctgtgctgcggccaggcagagcckgcgacccgcggcgccccccgcggcctcggcgacagcccggttcccacgtcggcgacggcgtgggtggtcccgcccgcccgggagggctccgagtcttggccgcccggggcgcggggcctgagagcgagtgtctgcgccgcgctgcccgccgcgccagtttccgaggtcgcccgcgggctcatgccctgcgccctggggccccggggaccttctccaagccggcctgacctggtggaggctgtgcgctgcgctcggggaaggccgggctggtgccgggggcagcgggtcccagctctgaagtgccagcgccggcgccccactccccgcctgctacggtgctctcgcccggaaaggcccgaggccctggaaggagccccgcgggggggcgccgtctggagcagccctcaggggcgccgggctgccgcgacgcagtggctgtaattgcttcggggtacctggggatcgatggcgtggcccagccgggtgtctgcgcctctgaggttgcaaatctggaaccagttaggatgcgggaggcrgataataaaaagccaaatgggcgccaggtggaggagtgagctccgcacgttccatcaggtggcccgggccgcgcgctcgggcggcggcagagtctctggggcactcggggcgggcggcagcaggtgggacccgcggcccgacccgcgctagggccgcccaccccctcggaccccggccgggtctctccacagcctccgtgcgcgtcccagaaggaaaatgctagcaaaccggaaggccgcacggggccgagccggcctcagcccggccaggagaggccgtcggtgccccgaggaggaaggggacccggcccgggacggccgccccgcggtacccaggaaggacgcccgccgttcccagcaccccagcgtctgaaaaatgaatgtgaactccgcaagcgtgctcccgcggacattttacatgtcggttgttcacattttaaaaatattctctgaaatagtctgcagaactttttcacatctaacaaatgtcagattgaacagatcagaagataagaaatgaacatgacattttaattcaagtagagagaaagcagacggtatttttaaaataatatttttgtaaaaacgtattgtggatctaagattttgtcatgttcaaaatgtataattttttgatatttaaaatacacattttgtacattttcaaccaaaaagacagggaaaaatttaaaaagcaaaagctggaaaccaagaaaagcctggagagaaaatgggccgtaaggaaccagagcccgtctttctccacaccattttttttnccttcctaatagccagaaagaaaaagaaaaagaaaaaaaaaagtgaaaataaaataatttcatattaaactaacacagagaactaattaatttctttccagatgggttgaagggacctggctgttttagtgtgctcagaaaatgctagactcaagttggttttctttccttctgctgctcagagaatcttacgaaaaagtaaacaaccccagcctaaccatttttttatcggcttattgaacacagataaaattagaatccttttttatttgagataaaagacacacaggaaaagactanttttttttttaaccaagggaatatctggggtttttttgtatgaaactgtaacatttaactaacatgtaatgagctgaacgaccttgggtttgtttcactctagctcctcctgaaatcttccatttttttctgagatggcttttccagtgatcttgtgtcagtaagagaggaatatacagtgcagcaaataatttgtgcattcgtggtcaatacatttctcagtcaaaaaatcaaaaacaggtcaatggctggttattaggaataacctttgaaccgaacaggaaatggggaaaatacctgtttgttgacgcttgcacgcccaggaggagaattgaggtgcagttagtttcactgtgtgagggagagatgccgctctgtccagagggtttattggaatgccaggccccaggtgtttgggtgtgtctatgcagacagttagtgctgacccctgaggattttgatgtgtataatcatgccataagaggaaggcaggtgggtcaattgtcagtgggagcacaggagatgctggggcatgccggagcctgggcagtttctatcctgataccttccgtgtccatgttttagtcccatattgaggacatgaaaggtccattttatgtttctctcctttaaaaactccccagtggcctactcggcagcattgctggggacccactggtcatttttcataaaaataagaccacagtgtggaccaaaacttgggatctgagatgtccttgagctcacctgtcacatcgagtcaccacctggagaagaaagatttgctgacctcctacagagccaggcaataggacgttcagcctcagtcctgattacgggtgggcagttgggtttatgtgtgtgtgtttgggttttttgttgctgtttttgttttgttctgtttttctgggaaaacaaaggtccctttgggggtacctgggctggccggtacggcaaacaggaaagccagccaggtcaggaggagacgtggcttcacgttggaatgccagtttgctttgtgattgtttattacaactgaaggttttgtgtcatctagcrttgcccaaagtagaagcccattcccaggatggatgaatctgtggtaagagataaacacaagaaacaaatgcccaggggaggaggagaagcagattgcctggggcaggtaagagggctacacctggaaatgcatctgctggggttctcacccacaccagaatctctggtcagagcagctctctttgaagaatgccagacaaacagaaacctggccacacccccaccagagttacctgattgaaacacgaatctgatcactgaaagccttcctgcatccgtctgctgcacgcaggaggcagctcggcctccttccccagtggcctcccagccctacctctagaatttcctggcccctgccctcctgccaccctgatatcycttastccctaagacacttgyccttgtcgccgacacgggcccagcggtgagagaggcgctctcngcccattgcccgtgaacacactgcgttcagggcttctcagagcaggccagcctggtggagctgctttggggcctagctctgggggtctcaggagtaccccagcctgcagataaggaaccctatgcaatgtataaggaaaggaaagcatggcccatgtgagcacagcattagggccttggaactccgtgtttagcaccccccatgctgcagccaaacattgacaccccaagttcyaggaccccatgagatggtgccttgcctagccagctgcgttgatgtgtgggaaggggcatgttgcggaaatcctccagcaggtcctggctcctgtcctgtgcccagcactggcgttcttgttcagagaacaaaggcccggaggcccctgcagaaccaagaaagcctgaaagccgtggctttcaaagcttgctgaccgtggctggggtaagaaatacattgtgcatctcagcccacggcaagccagacaactatgtataaaataattaattaactatacctagataaccaaaacacaatttttgcaaaagaatggttctcttactagacgtcatgaatgctgatctctgttcatcctatttcttttttccaaataatggctgccacccctgaaacaatcccatgatcctaatgggctgcagcgtggagcttgcagaccaccctttagagctgaggttgtgtgggttaagcctgagtggagggagacccgcagttccttcctgctgcatctcctgcccccacttccagccctggagtcagaacctcctgctggaatcctagccaccacttcctactatgacattgagaggccacctcccctcctgagctggagcctctgcttcttcctcttagaatgaggaggacaactccctgctagggtcttagagaggattcagcgagatcatgtaccagatgaggtcttgactcaatgtgtctgcccaggctagcacctgacagtcatctgtcacttttgatcctgtgcctccctggggcccaagatgtcttctcccctaccccccagtagccctccagtaaaatcctcctccccccttccaattccactccagtcttctccttgggccagctcctcctcaagccccactgcagattttgggactcacagatctgtgcagcgcggattaaggcctgccaccctggtggactctcaggcctgggctctgcctggctcgccggcatttatagacacatgtctgattgccagttagccccgatccaacctcaacagcactgtggacacagaggctgtgcttcttcccatttgcagataaagtatatggggcccaggaggtatcatcatgtgaccgtgagtcgcacagttagtggcagagctggggtaggctagctctcctggccttcaaagaccatcatgctcatggcccagagtccttcctcctggcagggcactagggccctttctgacaggctcgcagcaaccagatttgttccctggctgcccacctccacgtcctccaccctgggagagctgagttcgttttcctttgactgtttttttaatgcttccctcaggaggcaggccacagtcttcctgcaccaccctcacgggctctcactgctggagcaatgattactcacagatttacccaaggagagtgtgtacttggaatggctgtccgtgtgttccctgtgcacacacacacgcatacccgcacatacactgtggtgacctgacacacacacttccgtgatctcacacactcgtgcacacacacacactgccctgatctcacacaaacacacaaacactgccctgatgtcacacacacacactaccctgatctcacacactcatgcacacacacacacactgccctgatctcatacacacacacacacactctgccctaatctcacacaaacactgccctttgccctgatctctctctctcacatactgtcctgatctcacacactcatgcacacaaacacacactgccctaacctcacacacagacacacacacactgccctgatatcatacacacacacacagacacacacatactgccctgatatcacactcatgcacacacactgccctgatctcacacactcatgcacacagacacactgccctgatgtcacacacacacacacacgcacactgccctgatctcacacatacacatacacactgccctgatctctctcacacacccactgccctgatgtcacacacacacacacacacacacactaccctgatctcacacartcatgcacacatacacacacttccctgaccctatcactctgcacattggagctaagctcatgaaggctgctcatgcattttatttggcaagtctctctcacatctttaatcacactagcctgcccactgccaatcaataaagattaggaaatcgattgctaacttactcttgggttagataataaaattgtttgaaacatgcacctggaggaatttatctgtgaagagtcctttcagagtttgtttcaagctttgcaagtctctcatggctctgaggtcggggaggctgtgagggatcctccacgcccagcagacgtggaaggagccgacgttcttacgggagatggacagacggtcagcatgtgaatagtcccctgcatgcaggtgaggactggggcagtgcagagccgcagcagggatgggctatgcctgggagccgccagctctggatcaggtggccagggacggtcatgctgaagaggaaggctccagtgaagctctggaagaatgttctggtgcctgtatgtacaaaggcccccctaattcaggacctggccctgtacagatgaggagcaggaaggagccagtgtaactgaggccagtgtggctgcagcaaggggctggaggcgtgagaagaaacagaaaagaacggagggccatttctgcctccccagtccggatcatcctcctcctccaccccagagccccagggtgctgagccttgcgcccctgcccctcaaggctatggaatgtcattgccactcagcgtgaaggttctggaggggacctcaaacaccaggcccctctgcccagagagccccagtggacccgctgagccagggacctgctccttggagccaaccaccttgtgacttgtgaattgtgttgagtcccgtttcctttttcccttttgtttattgctttgtgtatctggcagctttatcccaaagctgctctcacgtggtccctctgtcccatcctgccattttcctccctctggggccccttgcatgggagactgggagcagcgtccacccgccacccagcagaggctcaggtcctggagttaaaagagaagcacaggcaggggaygctctccaaactgccttcagcccgcatctttgaactctgcagtaggaagactcctgggcccccatgtccccatgcatatgcacctgcatgcatgtgacacacttctcggcccatggagaagactgtccgcacgggggtgtgagctgcccagcacccactgatcaattgctgcattcccagctgcctttaagctggcatggggcgccctctgaggcacgcccagcccctggggcctagactctggtgttctctaggaactgtctatctctgtgtgtgggagccacagacttgggctttcagacccccacaatggatggctcaggcctatggctcacccccagcatctgtgaccaccaccactgcccaccttctttgcctaagcattacttctggggggcagttcttcacttatgtgtgcaagccagccttctagaaaactctttgctctcatgaccaggcaggccttgcacagtccagatggtgaagcccagttcctaccttccagtgaggagcacctgacccttcaggggcgatagacggggccctgcacagatgggacaggacaggtggggtgcacagaggatggcaggtgccctctgagaggcagggtcggggcaggtcgggcaggagcctggcatctgtggctgactgtttggcccctcaaggcctgttttgctcacagttttgcttcctccttgctctctgttttccctgccacctgaacttggttgcatgctgctttctgtccattgccctcagcctctcacctcagtcatgacccttaagccagcacctcccccatgcgtcttactctgaggtttcccaggagcatgagcctcctccagtgtcattgcggctgctttgatctccttaatggttttgcttgagtgtggattcatattcagactcttttagggacacaaagacccccaaagtggatgaatgccctatggaggcagatgcccagttgggggcccgaggtctggctggcctgtcctccctgcccagggtttgctgaacaccccagccacatgctccaggcacacaccgaagcttcagctcaagattcacctcggaggagggcatctagtccaagccacttcgtctaagaggcgaccaaggtggccaggacttacttgccatgagaccttggcaagtggacaagtgctgagagtggtgggaggtgacaggcttctctaccagcactggcaagcacttaatccaagccccgaggctccagctgcaaactgggacgggaatctgatgacacccaccctagagggatgggggtaaatgtagacgacataatttccatatgtctgcattgagcgttcacatacatgagcgtcctcagaagcattatctcctcatgcttctccaaggaatgtgcccttttcttaaccctggttgactgagtcctaccgaggaaggaagggtttcaggccacaccccagggatagcgctggatgcccccagccaggccaaggtggtcagatttccttgcaagagtttgagcaaagacacagagattgaattagactgagctgggcctggaggcttgaggtcctgtcgacgaggagagcgatatctcagtgtatgaatctgtgggttttctgtgtgcccttgcagtcctggggaccctcatggcccttggtgagcccacattgaaggagaagaaccaagaggcggcagagaatctagattcaggctgcagaaagtcttgctactgcagaggtgagacgaggccagggcaggaagggagcaggggtggggtgcaggaccctgagtcccctagaggccacggtaggacatcagcagcaccagggggagtcaccaaagctaagtgccaagatgyggtcgacygaggacctgctcctggtgcccgccccttcagcccagagacggtgtgtggtccgtctccacccagcacaaccgtcctaaatacctgaatgagtttccttgagctcctgcagcagagacccataaaatgcttaaaggagcagaaatctactcccttgctgatctggagcccagaagtctaaagtcaaggtgtcgacagtgtcgtgctccctctgaaggttcctgggggtgcccttcctcacctcctcagctcctggtggccctggacatccgatggcttgcggctgcatcatccactctctgcctttgtctttccgtggctgccctccctctgcatctgtctctgtgtccactcctctttttataagatcgccagtccttgggtctaggccttgggtctagggcccaccctaatgcagcgtgacttcatcttaactaattacatctgcaaagaccctgtctccaaataaggtcatattttgagcttctgagtggaagtggatttgggggacagtcatcaacccagcacaatgcccctcctccccatgctctctaaagagagaaggatcttggacatcttgattggacacgatgacacgaagacaaaagtttctgactagctaggccaagggtggacacattgtccctggagtgacaagtcgggccagtgatcttgtagggacaagcctacatccagagcagtgctggtataggggcaagccaacatccgtggcagtgctggtataggggcaagccaacatccatggcagtgctggtataggggcaagccaacatccggggaaaaccaaaggcctgtaggaaaagcctatggggaggatggagagaagagggatggagccctggatgtaacggggacctgcatcctgtatccctgtccctatgatgctgtgatggtgcctgactttctgtagaccaaagctctcctttttttttttttttttgagacagagttttgctcttgttgcccatgctggagtacaatggtgtgatctcagctcactgcaacctccgcctccgggtacaagcaattcccctgtctcagcctcccaagtagctcagataacagtcatgcaccaccactcctggctaatttttttgtatttaatagagacggagtttcaccatgttaatcaggctggtcaagaacttttgacctcaagtgatccacatgccttggcctcccaaagtgctgggattacaggtgtgtgccaacacaccgggccccaaagccctccttttactggagctattttgcacgggatcaataggcttctgcagtggtgctggccatcctagcatccctggctttccttccctgctgtggtctatatagtttgggtggagctgaacccatagagttgccggctgcacatgggaccagtgccctccctttggacgctgcaatcagcttgggagtttactcacagctgaatttgagcaacatgaggaggggagattcataaactggtagaatgaaccatagagctgacagtcacctggccactttgaggagaaggcctgctggagaacgaagacctggaggaagctgaactcagacagatggacagacagacttggtgacgtcattggaggcaccaggtccagctgaaccttgaactctgtcatcacaggaaccagtaaattcacctttaagcccaagttgagtttctgtcactcacccccyaaaaaagtgctgatgggagggtgtctgggtaacaactgcatgccagttgaccacatccatgccgctgccagccccggatctggggtagagtctagccgcctgagggcatcaagtttgtggcccatgagggtcgtagccatgctacagggcagaggacaagaaccgggtccccatgagaccaaaaggagacaataggtggaaaggatggcctgcactgaagccggggccaccaggcttgtcgcccctcactctgtggacagactgggttgcaccatttctgagggaatctccatgactcagtcctgggcattgcggctggggccagtactcaaaatggcagcagacgcagtcggcctgccagcccctgctagctcttgtttcaggtcagaggaagaaagtactggtggcctctggggatccagaaaggactggtggcctccaggtgtccaagagtcttctcttcaacgaacatggtgagggggagcattgtgctgggttgatgagtgtcccccaaaccaacttccactcagaagcccaaaatatgaccttgtttggagacagggtctttgcacacrtaactagttaagatgaagccatgctgcattaggccagggccctgtgtccagggccttccctgtgaggtggccgccaggaggccgacctcagggacacaaggactggaatgtgggggtctttggagaggcatgacgccccctctgtgagtggacagacatcaagaatgaagggagccctcaacggggatggagcagcccctgagacctgagggtcccaccctgggacaaaggtgccctgagctcaagccaggacacccagcagctgccggccaggctgtgcttcccccacagcctctccacaccctcgctgtgtcttctgtaagatgaggtcccctccattaccctgggccagggatctcaaaacggaaggccgccaaccagtcagcggccaggggctggagcccatggtttcccatggctcccactaggacacttgccagagagggggtgggtgagctggttcccatggagacaggctcaggatccccagaggccaccagtcctttcttcgtctgacctgaagcaagagcaaggccaggggcttacaggctgaccgtgtctgcctccgtctcaagggcttagactgagtgagactggcagaggccctccaggtcactcccattgtttcacagatgaggaaaccgaggcctaccgggagggagggccttccgacaagtcacggaactgatcgggggagagctggatgcctgctacaccgtggctctgctgtctcccgtggaaacccgggcctctgttcgagcctgaagtggcctctctgcaccaggctgctgggagacctgcagtcaccaatggcaacgtcactcttgcaacagccagtggggtgtggggcagcagacgaagctcgagtaccgcctgggttccaagacagaatgagacaaagtgaggggtcatatgggtgcctggcctcccaggcagatgtttctgttaccaggtggtctttgaattctgtcctggactaaatatagttccttgggcatttttgatcttggtaatcatgcaaccatggtacagaaataattggtccgctctcatcttttccagattacagttcggggcagctgagtaggccctgggtagagggcacagaggtatggctcgggtgcaggcgggaccctgggtgacacccacgcagggtagagcccctcccccggcctcggtctccccacctgtgtaacgaggaagtggactggacatgactcacggttcttccatgtccagcattctgctttcagcatcacgggaacgagaggtgatttccgtaagcaggctccaaggtgccaccaccaagcccagaagtatctttcccactttgcagatttcctacagacccagtattctctcttccatgggttgagtttctaaaatcacatgactgtatttttcttttaatacagaaaagcataataaaggcataaaagcccatgcccctctgcagagcaccctgttgacattttctgaaagtaagtcatctatgcacctgggaagaaagcacagaggactcagaaaggccaaaaacaaaaacaaaaaagccccacctcagcccctgcccctctcccggagaagccggagttgtcagcccatgcagcagagttggtcaggagctcaagttcacatcccccaaccgccacatactacctgtatcacctgggcaggttctcccaatacctcagtgtcttcatctgcaacgtgggtaagatgggaatgcccacctcctggggaactcaggactcgctgagttaactgcattcagggacctgaaagagactcgccaggcagtaaccccagtccacttgttccatgctggtgtgagcagtgactgcatattcttccaaaagcatctaccccatctattttttttttttttttttgagacagggtctccctctgtcacccaggctggagtgcagtggcatgatctcagctcactgcaacctccacctcccgggttcaagcgattctcccgcctcagcctcctgagtagctgggattacaggcgtgcaccaccatgcccagctaatttttgtatttttagtaaagacagggtttcaccatattgctcaggctggtctggaactcccaacctcaggtgatctgcccacctcagcctcccaaggtgctgggattacaggcgtgagccaccgcgctgcctatactatctatttgttaagccccaaatggatcatactttggttcagcctcttgcgttctttgccttgtttattttagagacctgtctatctcaatccatgcagataaatgccttgctctttcttaggtgccaccaagcatagacacagacctccccaatgccccatctttcgccattaatcaacagtgttgggatggtaggacaccaggagttagacacctcaaagcaccggttctggccacactggttatgcatattgtactcgactgattcacactctcatggccctggatgagtgtctctggccatcccgcaggctgggtgcttcccagtctgagcgtggtggcctgttcttctcatggctattaccccgggcctctgtgggtccaccagccagagttctgatgcccggcgcgctcacaggagcctgacttggggacagctttatgaggcagtgcagggaccttgaggccatagtggtgcagcagagaggtggggatgaggaggggccgccagggcccagggcagctcctggactcactgggagagccgaagtccacaggcagctcctcacgccttgtcaggcctgccctgcactcagctcccagattttatagaaggaagtccctgcctttaggcccagtcaaaaaaaattggactgggatattaacaaccaactttccctggtgctttcctgagtcaacctctgcagccggggctggctcagatgcctgccttggggccctctggggcagcgtgtggagtcagggccatctgtgatctcctcagcaggttccatcctgaccctggagagccagctgacttgtggaaacagcaggatgccattctgagccaagcccagtgggtaggtacacagggccaacccaggtcacccatcaagtgaccacagagcaatgacacccatctgccccatactgtcactcgcttagagaaagttccagaagaggggctccaagcatgtgtcccrtgataaagaggcggcctctgcgagggttaatttcagtgtcaacttggyggggccacagcgcccagatatttgaccagacatcactctgggtgtttctgtgaggggcttggggatgagactcacattggaatcagtgggccaggtaaagcagtttcccctccctaatatgggtgggcctcatccaatcagttgacagcctgaataggacaaagggggtcccgtcccctgagtaagatagaattcctcttgcctgccagcctttgagctgaatgtctagctttttcctgcctttggacttgaactgaaacgtccgctctgtctaagctcgggctgctgtagactgtgtggcttaagcatcaaatattcatttcccaccattcaggaggctggaagtccagcaccacggtgctgccaatttgattttggtgagggcccacttactgctggccttcctctctctacgtcctaatgtgacagagatcagagagagagagctgccctgtctcttcttataagggcactratttcgttcattagcgctccaccctcctgacctaatcaccttcaaaacaccccacctcctaagaccatcacattggaggttggggtccaccatatgaattttggggggacatgtctagtccctagtagcctcttctgggtctccagcttgctgactgaaaatcttgggacttatcaattcagttattccaggagccagttctttacaataaatccctgtttgtgtgtgtgtgtgtgtgcgtgtgtatgtgtgtgtgtgtgcatgtgtatgtgtgtgcatgtgtgtacattctgttggttctgtttctctggagaaccttgactaataacattctccaaggtgacaaggagactgacagggggagagtgaagtttaacacatcggttaaaatagtcacaagattctcatcaactgccacaaatggcatctggccacagccactgagcttggccacttctccggctttgcaaacgccgctggatgcgcccggcctgctgtcccacagtcccaccctgccttctcctacgtgtcctttctgaactgccttccaagctcctcccaaccccgtagggtccacctcattgtgcctcctttgtctcctcctccgcagctcccctcccaacactgggttcctagctcctagaggtcagaggtcacacttttccctctctctgtctcggtaggtgaaagcagtaagtggcacctaacgggaagtgatggggttggtggggaagagaacaaagtgtggatcagtcctgaggaggctgtgcaaagacccagtgctgggtccaaggcccaaccccaagaaccaggatcttgtgcctcagtttcctaactgtaaaaggggatgttggaatcacgtgtgtcaaagatcccttccaattctgttctttgtgggttttctcatgtctagagctggaagagggcaagcagagaacgcccccgcctccaggccccgagcactgtgagctgtctgcctgcacagggctgcctgaccccaccctcctgaccacgtccccactcctggggacggttcccggcctccacggcatcccggggaaggcaacagagatggactggagggcacgggaggacacgcattcactgaccgtccagcccagcaaagcaagaaaccgtcaaaaactaaaaattccatttgtaaacaagatcgaattatttgattgtgaaaccagggtccatggaatttaaaataatttaatatgaaacaatatcatttgaaatgctggccagccaaggacctggacggggagggggactctgtcctcctgtgcccagccacgtggaaacccagcctcagagaataataacaaatcattctacagcaagtgtggctgagattcagctacgtggcagccccaggccaggcccggggggcagccggcgaagactcctcgtcctctcagagtttacggtctaactgagcagaccagggttggacaattaaataacgatgccagaaagcaggagaggagtgagtgggtggcactcaagccaaaagggaggcctgatagagccaaggggagtgtgctgtgggccatggcactgccagaggaggctcttgggtgctctggcaccgcagtgagcagctgggggcttggtaagtagggaaagccagcactcagaggagaaggtggcagaaaaagaaatattcagaataggaagcgtgatcatttgcaaccccagctttgtcttgtactgcccatgccaacttgggcaagcacgttatcccaagcctcagtcttctcatctacagaatgggaacaatcccagtccctacttcctggctgttgtgagggtcggaaatcattcacgtgcagccctctgggagcccgtgtccctgacagacagtggtgctccaggtggagcacgaggcaccgctggcgctgtaagcagatgcctgtggagggaggggaggagcaggtttcctagaggcctgggaggggctgatgcctctgcagtgggctctgcactcagctgccttgaaatcccagcaacagtgcctgcctggagtgacgggagcaggctctttggggaccggggggtcaggagggcacatgcacgtgccttgcagctggtgcctcttggaaggatggggaggcggggacccggcagaccctggtgcaccgacactccacagccatgtcttctgcctcaacataaacacgattgggaatagttcaggactgtaagagcaagaaaaacaaacccagggaaaccaaagagcgcgcaaatgctaactttcatgtcacatccagaaaccacatgttcatcaagccacctgcgggcttgtaactcagtggggagacacagggttgttgtccttagaaaaatcaagctatccttacagctgcaaggggaaaagtccagttgctgcctcccctccatcatcctggaccaggtccccccacagaacagccctttgaggcagccagggagcttcccgtcgctgtggccacctggggcatggcccctaaacctttccgtgcacagggggttggggaaaagccccggacctccaggctgatgagtggcaggcccagaacccccatcagggtgcccagctccccagtctccctgtctcaccaccaccccaacctgggctcagccgcccccgttcagggcaggcaggacttgtcctggcctcggggaggggccggggaagaggagagaagaccccagtggggccccccaggcccgcacatgccgcccgactacctgtgggcttggggagggctccagatcactcctgccctcagagacggcgatgctgagaagtgttatttttattcctccccaagccttgccagattacattgtcaaggccagcactttggagatatttccttggtttcgcaattcacacagtgactaacacatgttacattttgaaaacttctctgggtaaaaatttaagctgaattgtaaatacataaaagtctcaacgttaatggggtacatgatatctcagtgactattgtgtaacaccaagattcggaaaggatgtggaattccatatagtcgggtgaggatgccgtcccagagccgccctgtgaaagcatcattgtgagcagcaaccttgcctttctctgcggttatgtaagttacaaaaccctttgcctcttggcctcgtgaggcatcaggaccctcaggaggctggaactgcagagctccgcccgcgatgatgaatcccctccagggggcatgtgcacacgtgcccggcacaccctgccaggggcttcatgcttgtgacctccttggcaccatgaggcactgggctacaggtgacaaaactgaggcacatgcatgttaagggacttgcctaaggacatcccctgacagaggcaagcaggactcaatcccagatggaatgctcactgctatgcccatcaccccctcagcccctggtgctgggcagctatgagccatgctgtgccgtgtcatgcacactgcaccccccccccaatgatggcacaggatggcccccaccaggacaggcgatgcatgggcggtcacctggggtcactgtcagagcatctggactacgaaatgaaggggatgggccacttggcagtgtccctacgcaagccagagctacaggagcacctgggcataggtgtgggaaggaggcagggagagaaggaaggaagcagagaagccaagagtggttggggagtggctgtgttgggagccagtccccccactgcccaggctcctgcccagccgagtgcccagagccctgcccatctgcagcagccctgcccagccctcccgagcctccacctgcctgttcattgctttgctggatgacgcttatcagcctctacttggccagttttctgtttcatttccccgttcaacattgatctccacacaggactgtagactccatgcaggcagcacactgtctgccgggctcctggccgcatcaccagagcctggccccaggactgggcatggtgggcattgagtagttatttgttgaatgtatgcacctccgaaagaaagagggagccaccatcctcgcctcgctgctgtggctcactgagtggctttaccacctaagatgcctgctgcctttctcctgctccttctgtgacctcagacaggcagtgcaggggaggggtaggcagggcagctctctcctcagcagagctcaccttgggccactcaggggccaggaagtggcagtgcaactcgagacgtttatgacacaatcaactccctgctgaatattgatttttcttcaaagctcagggcctatctgtctgggctcctcccagcgccacccccagccctgcctggcgagcctggagactccagcagcaaggcttcatgctcccagacgctgcaggtccccctactccgccctggtcagggccctccccaccgacatcctggtaacttagacattgcaagccacagctgccgcagtgtgccagaaaacgtccctccaaagacacaggatttatgaaggactgttctctgctgtgtcaggaagggtattcacacaggttgggaagcatctcatgtgctcctttattgactgtgctgggaaatactgaagtgggcaaatgccgtccatctgagctctcaggacacgtaggggataaaggggagttgaggctgaccaggaggctatcacaggtcagtgtgataagcacaaaaataaaagtatgcccagggcaccaggacggcaggatccgctcgaagtggggtcgacagaggcttcccaaagaaaggaagtttccaccatctcttgcgattttcatttggcatctccagaatgcctgttctattagaaccaactaaggccttaatgggattactcagctttcagtcataacaagtttgtctaggtcatgtagggaggtactttaaagtcattcttccttctcttttattatagcaatgacttacaatgcttgaaaaaacattttccttaattcaattaccaagtgagctaaatgcatttgctggagataattaagaatctttacaaatataaaacaattatcccatcaaaatacagtgctggatgctattattcacgctgggttttcaatcagagccccctctccccttttaaagcaattccaaagccccctgtgcctgcctttgctggccgtccctgtgagcccaggccatttgtcctgccagctctccagcaccatggaagggcgccctgtctgcccgacccctggcccggagccaccagagctctcttcgctcacctctctggtcctagtcttggcccagagcaggtatcaaaaacaacgtgacacagaccagaggagccgggggagacgtgacaactaaatgcaatgaagtcccctggcgtgggtcctggaacagagacaggacattaatgggaaaactagcgaaatccaaataaagtctggaattgagttaacaatggcccaatgtcagcttctgagtgctggcaaatgtaccacggtaatgtgcgcggttcacaaagggaagaccgggtggggggcgaacgggaactctctgtactatcgtaacttttctataaatctaaaattgttccaaaataaaagtttataaaaacaaagcaaaacaacaaatgggactgagtgggcaaaagagaaggcagaatgtctccattgctgaagtgagtattcctggtcttcagaaacccgcctggcccccacacccaccccccacctccagttgcagtcccgtctcagttccctctgaagacaagtctcagggaccagctgcctgcggttgctgcctccacttcaacactatctctccccacgctatttgtcctgagccacaaagtgaaggtgaggtgtcaaagtgagcacctgcaggacggcaccctggatgtttagcctaagaaagctcccccgtcctccttagagaagcccccacattgcacaccaaggagtgaggctgaggcagtgctgctgtcagtattctccaaggccgctaactggacctctggacaacctgctcttcacagggccccctcagtccctcctgtcctggccacaggccacagcctccctcagacaggctggaatgaaggaacacactgagcctggtctgcaaaccctggcgggggcttgtactggacagcagtgctgatatggggtgggctgagtatagcagaggcataacttccatcccccaggtctgggtacagacacaggcatgacttccatcccccagggctgtgaaaaggagacgctgtccaaggcacctcatctgacggtgcttgcgatgaccgtgcaggacatcagaggggccagaagcacccacggccctgcggtcggtcgtatttacctcatcattgccatgcctttgaggagctttcctgggccttctgagtgcctgagcttgggaagtaaccagtggctctatgagatttcccccagagggcactacgattttcatgggcctctcccaccataaaaatacctgtatttaaaaacgtgtttaaggaatacaaatccttctaccataaagataggcatgtgtccttgcggcactattcacaatagcaaagacatggaatcaaccttgatgcacctcagtggtggactggataaagaaaatgtggtacctatataccatggaatacgatgcagccataaaacagaacatcagacatcaggtcctttgcagcagcacggatggagctggagggatggagctggaggccgtcatcctacgcgaattaacgcaggcacagaaaatcaaatactgcatgttctcacttataaatgtgacctaaacactgagcacacatggatacaaaggaggaaacagggaacactgggacatactctagggtggagggaggggagaggctgaggatggaaaaactacctttcaggtattattcggatgacctgggtgacaaaattatctgtacaccaaaccccatgacatgcaatttacccatgtaacaaacctgcacatgtacctttgaacctaaaataaaagctggggggaaaattgtagtaaatgtccctaagtatgaaataaataaataaaatttaaaaataaaaaaattaataaatcttcaaatgcttccacatatttttttctggtttaagcaaagttagagagatgttcttgggcccctaaaggtatcaggttgagacagacatcctcgccctgggcctgcggagcttaatggacaggccgggtccccgggccacacttaccagttaagtgacctggggcaagttacttaaccaccccatcttcaatccctcatctgcaaaacagggataatgatacctgctctgcagagcttttatgaggattgcttaagctaattggtgtaaaagcattaattccagcctggcccccaggaggcgatcaataaagaagcattactcttgtgaaatactctagccatcagagcaggcaacaatgtttctgtcttctaaaacgttcccaagagagcctcggctttactctacaaataagacctcttgattttattctgcgagcttaaatatctttgactctctcattacctgaaactcaaggtccttaaataggtctgaggcccctaaacgttcctctaagtgccctgtagagccatcacttagtggctgagacacactcgctggctttcccatcgacagatgcctcggtggccctttctggatcatctaatccctgctccaggccactggctcaagttccctcattgtaataagtgcaagggagggtgtttatgaaggaaagcgggtttgactgaagtccaggctgaactcggaatttccctgtttgctttctcttcctccccgggcgtgctgatggaccagacctgcgggagctaactcaacaggcctccagctgccagagatttgagatgttagtcagggctcaggggcggggggctccgggagcagggagcagggagctggagccctgaaaagacctcagcgtctccttgtcaggactgaacttccaccttgggtcctcgctgagtcttattttgctaatgagatcagacaggcttgtaattttaggtaactgcaattgctaagactggaagagagactcattctctggcattcccacaaattcttcccagtttgtttagcttaggaaattaggcaagagcaggtagaaaaacggcaggtcaaacacaagccattgcaagaaactgactcatgctttaccaacagcgttattcatcccccccgttcctctccctggctatgtatttattcgtttattcagcaaacattgattgagcacctaacatgtgtctctgccttttcacaccctcaggcccttgcccaggctgcatcctccgccatgtcctcccgttgacccactgtgtatccttctagaccaggtcaaaggctacctcctctgggaagcctgccccaaagttccatgccagacccaatccctgcctctctgtaggaaggagactaccatggctcccaagaggagcactggctgccgagtcagaagaggttggctgagaagcacggctccaggacatccctgatgtgtggcttgggcaaggtactgaggctttctgctttctttcctcttctataaagtgtgaatactaatacctcccaaaactaagtgcccagggtgctacataaaatacactacacatcactttccacgtggaactgagcttacaagaaaggcaaggagtttcccagaggccaaaggcaggggaaagccaagagcgagagtgataagtcggtgctggcatgaagccacctcaggtgtcaggcagtcccagtggctttcagtggccatccaggggcagagagaaggtgggatggcaggattgccatccttgcaccaaaccagaacctcagaggttctaacgccagtggaggggcaacttgagaaaaccacctgctgcatgtggaggcttctactgcttacccatattaaatgctcttcttcctccaggcgacagatgaacacagtctctgaccccagcaattagcctgggcttgggactagctctggccaaagggctctgagaggaagcgatgtgaatcgctcctagactaaagccattgacaccaccagactcggcagcgccatctctctcctgtggcacgtgtggaggctgagcctgaaaatggtaacctggacccaggctgctccagggaagacatttccctggagagttactcaagtccccagcaaactttgcaggagccataaaagcaagaaataaagcatctgttgggtttagccagtgagagagttcctttgttgctgcagcagaacttaggctatcctgactaattcagctagtaaaagaagcagcaggagcacttgtctgtctctctctgggatccaggtggaggacaagtctcccctgacaatcacagccacagacctcacttcacaggagggtggggttcgaattcatactccctttgtgttcaaggaaactccaaaccataaaattaaagatatttcaggtatgtagtgttccgtgactagaagcaaactcagatcccccaacctgacctcacaggattcccacaaataaagactcaccagaacaggcagtcgaaatcccaaattcaaaccccaagaacttcaaacaaaaattactcactagggaatttttaaaaataattttaatgcataaagaaatgaattgagagccaaaactatgggcaattagcaaagtactatcaaaagtgactaaataaatttgaaagagaaccaaacagaactatgaaaatcttattaacgatatgaaaacctatttggtaaaactgcagattcgaactggctcaacacagaattagtgaaatgaaaggtagaattgaagcaattacccagagaatcacagagagaaacgctgctggagaaaaaaaaaaaaaagaggtgaagaggcatcgaggcagagtgagtagcgtgatagctaattaacgttctggaagaggacagtagaaataacagggctgggggtgcatgcctaaagctataatggctaagaatgctccaagattgacagtagatgtgaatctttagattcaagaatactagtgagtttatagcaggataaataaaaatatgccttgagatatcatagtagaactgcaggataccaaagacaaaaggaaagcatatgcttattataaattcatcagatttattaatttgtaagagaaaaatgtatcaagcacctgctaggtgccaggcagtgttgtagacacttgggatatatccgtccagaaagagacagaatttgtgttcattgtcaccaggaagacaggtgacaaaaaataaacataataaataagtaaattatacagtgtgttagatattggcaaatgctatcaattggaatatatggaaaaagaaacaaaaaaggatgaggagactctgagtatgtgtgtggttgggagaggctgagccagggcaccatatttaataaaatgtcaggggagttaacaaagggaagagataacctacaggataggagaaaatatttgcaaactctccatccaacagggggttaataagcagaatgtataaagaacgcaatagcaaataataacaatctgtttttaaaatggacaatagacctgaatagacatttctcaaaggaagacatacaaatggccaacagggatttgaaaaaatggtcaacatcactaatcatcagggaaatgcaaatcaaaaccacaatgagacagcatctcaccccagttaaaaatggatattagcaaaaagacaaaaagtaatggatactggtgaggatgtggagaagaacactgttggtgggaatgtaaagtaatacagtaattagggaaaacagtatggaggttcctcaaaaacctacaactagaactatcacatgatctagaaatcccactgctgggtatgtatcctaaagaaaggaaatcaatatgtcaaagtggtatccgcactcccatctttattacagcactattcataatagccaagatgtgggatcaacctgagtccatcaacagatgaatggataaagaaaatgtggtatatgtatgcaatggaatattattcagccataaaaaggatgaaatcttgtcatttgcggcaacgtgggtggaactggaagtcattatgctaaatgaaataagccaggcacagaaagataaatatggcatcacatgttctcagtcgtatgtgagagctaaaaaaagtggatttcatggggagtggaatggtggttactagagctaggaagggcaggagggagggagagaagttggctaatgggtacaaaaatacagttagatggaaggagtaagttctagtattcaatagtatagtacagagactatagctaacaataagttattgtacatttcaagatagctaaaaaagaagaactggaatgttcccaacacaaagaaaagataaatatttgaggtgatagatattccaattactctgatttgatcattacacattgtatacagatatccaaatatcacaggtactcccaaagtacacacagctactacatatcaatttttaatattacacctgaaaacaatttcaagagaggcttcattgagaaggtaaaatttgggaggggaattgaaggagaggaaggagttggtgagaccgagatatggaagagtgtctctcaggaagagaagcagctagggcatcctggcaatttgtgtatcttcatttacaaagtgtctgtccaaaccttttgtccaactctttaattgttgcatatattatattattgagttgtaagaatttcaaatatattctggatataactctgtatcagatatatgtattgcaaatattttctccctgtctgtaacttgtcttttcgttttcttaacaggtcttttcaaatgtagacattgtttattttgatcatgtccatttttatctatttttagttttatgcttgtgggattgttgtgttctgttaagaaatatttgtcttcctcaatgtaacaaagtgtctagaagttttacggttttggctttgtttagggctgtggtccatcttaagttaatttttctgcattgtgtgaggtagggttgaagtttatatctttatggatgaatagctaattattccagcaacatttgtttaaaagtcttcccttttcccaataatttagcttggcccttctttcaaaagtcaattgaaaaaatatatatcatataaagacttattatactatatgtatttttccagactctttattctgttccattgagctgttcttacactaccacactaccttaattattatagctttatcatgagttttaaaattgaatactgtaagttcccctcactttttttaaattgctttggctattctatgcccactgcatttctatataaattttacaatcagcttgtccatttctacaaaaaagacagatgtgattttagttgagattaagttgaatctatggatcactgagggctgaatagacatttaacaatattgaggcttcagattcatgaacttggtatatctcttcgcttatttatgccttctttcatttccctcagcgatgttttgtagtttttagtgtacaggtcttgcacatatttgtgagatttatctctaggcatttcataccttttatgctattgtaaggggtattgtttttaaatatctttttatttggaggtaacgttaaaatatcgaaagagtcacatccacagtacagagactccctgtatattattcacccagcttgccctcgtgctaacattctacataatcacaatctaatcatgaaaactaagaaattaatattggtacaatactattaactcaactacagactttatctggattctactagttttccactcatgttatttttcacttccaggatcccatccaggatcctacattgtatttagttggcatatccccttagtcttctacaatctatgacagttcttcagtattcctctctttcatgacttgaagatgctttcatggcttgatggtctgtcagatattttgtagagtgtctctcagttgggtttggtttgatattttctcacgactattcatggtcacgctttatcaagaatactactggagttttgtacccttctaagtgcatcaaactaggcagttaccttatttattactggtgatgtgagccttggtaacttggtaaagagagtatctgtcctattccttcactgtacagttactatttttctttttgtaattagtaactcttgggaaagatactttgagactgtgcaaatgtcctgtttgttaaacttttgcccactaattttagtatttggtgtttaacttgcctccagcaattattgctgtggaatttcaatgatttttctattttcctcatttcttctacatttgttaataggaattcttctttaatgaggtgttgttccttttctcccatttatttattgatacttataatttaatattatatattgcacattatttttataatgtaaaatataaaaattatatatttattatgtatatgtgtgtgtgtatatatgtaaaataacctgaggaaaagattttattattttggttataatccaatattattactatttattttgttgctcaaattgttccagctttggccattgggagctctttcaaattggttcctgtgtcctttcagtacccatgatccttttggtttttgagtatatggtttatcatatggtattattttttatttcaatcaccaactgttctttgttagtatatagacatgcaatttatttatgcatatttaaaatgagtttcttacagacaacaggaaagtgaaccttgtttttttatccagtgtcacaatctctgccttttattggagagtttagacttttacgtttaatacaattaatcagtatcattggatttaagtttaccatctagctatttgttttttatttatcctatctgctctctgttcctttttctcttttttccttgcttctttaagtttaattgagtatgtttttaggattttatttcttcactagtatctaacaaactatctctttgttctaatttttagtgtttgctccattatttaaaatatacatatttaatttatcacaatctaccttcaattgatattatattatcacttcatgtatgatgtcatattcctgctacagtatatttcaatcttaccccacccatccttcatgtttttgttgtcatagatattactttttaatatatcgtaagcccaaagtacatggttgacattctgtttaaaacagtcaattgtcttttaaagacattaaaaagcgagaaaaaagtcttttaatagatatttttaaatgcatgtagcacaataatgtaaacagttcatgtaaaacaccaatttataatattctatatatatatatatatatatatatatatatatatatatatatatatatatatatatatatagtttccttcaggtaataggttggaagggtttagaataaaatgaacatgcatcacatctgttattttaaaatatttaatcaagtttttaaaatgtttatgaaccaccagaatgccactgccacaaatatcattaccaataaccagtcttttttttttttttttttttgtgagacaggatctcactctgtcacccaggctggagtacagtggcatgatcatggctcattgcagccttgactttcgcagactcagatgatactcccacctcaacctcctaagtatctgggactacaggcaggcacaccaccatgctctgctattttttactttattttattttatgtatttttgtagagatggggttttgccatgttgcccaggctagtctggaacttccgggttcaagcaatctgcccagctcagcctcccaaagcgttaggataacaggtgtgaaccaccacactgcctacaaataaccattctttaagtgggcttttatttgtttaaaaaacttttttgtgtttatctacataattgccattctcacagtcttcattccttttcagagagccgggtttctatctggtattgttttctttatgcttgaagaacgttctttaacatttctggtagtacaagtctgatgacgtcttaaaatgtttattttgccttcatttttaaaagatattttcgtaggatacagagttctagattaacagcttctttcttgcacttcttttgagatgttaccccattgacttctggcttacattgtttccaaaaagaatactgttttcattttcaccatgttcctgtgtatgttacacgtctcatttttctctggctgcttctaggattttctccttaacgccggtttcagaaaactgcttatgatgtggcttgctgtggttttctttgtatttatcctgcttggtcttcattgcacttcttggatttatagatttatggttttcttcaaatttggaaatttttcatccattatatcttaaaacattttttgtcctctccttgctttcgaagacttcaatttttccataccttagatgacttactattgccccatagtcactgcgaatctgtttattgttttccagtctcttttctctgtgtgctgtgtctcagatcacttatagaactatgtcttcaagttcactagtctttgaaccagctgtcaagcttatccagtgaaatttgcattttagacatagctctaccagttccacatagtttctttttatatcttccatttattttctcactatggttatcttttcatttaagtacttgaacatagttataataattgtttttaacattgttgcccggcatttccgttgttcgtatcatcctttggtctgtttctattgacggccttattccctggctgtggttcacattttctggctttttggcacatggattttgatcagatgctgaatgttgtgaatgtttcattgttgagtgtctgtaatttgccatcctcttttaaggagctttggggtttgtcctgcttggcagtttagttacttccagttcagttacacactttctaggctcgtttttagctttataggacaggtctagwggatcctttgttctagagatagtttgggcccactgctaaagtgtggctcttctaaggtgtctaccgaatgcccggtgatcagcaagaaggaattctgaactgcaattgcaattgagaacttgaacgatcccatctccacatggactttatgaacgaacagttcaacgcagctccagtgaattactctttgactgacctggtgagttttacctgactcaggctttttttttttttttttttggtattcagcaaagattaaagaggacccctttgctcctattctgtagctcttttttgcaaagatctttcctttttgtaagtatgacccccggcttttggtgacccccctggagaagcctcagtgctctgcttagcttcccacccccaccccgagtcccacacagcagcatggaaacctccaagcagaaagtcaggcaaagaaagggctccttcctatctcccgcttatctcctcctgggagcgcagttgtttgtctctcttgcccartgtaaagaggaaggtcagtgcagcccctgttgctccatcatcatggttgggagcagacatctgtcccaccacatggttttgagctgacaattgaaaagaaactgacaattgaaaagaaacactctggcttctgaactgagaacagacaataggagtgcaagggcagaagcaaggagacttcctagggggctatcgcatcacagccatccagaaaatgaatggttgggttcaaaatgaatggtaacattttgaatgcaaagcttacagaaatccctgatagattggatgtaaggaaacaagacactttgggaggccgaggcgggcggatcacgaggtcaggagatcgagaccatcctggctaacatggtgaaaccctatctccactaaaaacacaaaaaattagccaggcgtggtgggggacgcttgtagtccaagctactcaggaggctgaggcaggagaatggcatgaacccgggaggcggagcttgcagtgaggcgagatcgtaccactgcactccagcctgggtgacagagcgagactccataaaaaaaaaaaagaaagaaagaaagaaagagagagagagagagagagagagagagaaagaaagaaagaaagaaagaaagaaagaaagaaagaaagaaagaaagaaagaaagaaagaaaagaaagaaagaaagaaggaaggaaggaaaggagaaaggaaggaaggaaggaaggagaaaagaagaaaaaagtcaagatgatacaaggtttgggtctgagcaactagaataatctcgttgccatccattgagatgctgcagtctgtgggtggaacacgtctggggctattggggaattgtttggaggcatgagcttaaatgtctacgaggcacacacacgtggaaatgtcaagctgggactttaaatatacaattcctgagcttgtgcagagtttagggttggagatataaatttggggtgagtgtaggataaagagaaagaacaaaatctaacactgagaggctggggcatggaggaccaggagggctcaaaggagacagaaggagcagtcaaggaggagtcaaggaggagtcaagggccgaggaccaggagggctttgagtcctgaagcagaacagtgcatgtcagaaaggaggatggactgcagcagctttgtaggtcaagaagaacagggcatagtagacaaccgctgggtctgacagcgtggtggtccctggtagaatcatgtcgctaagagcctgactttggggtaaagaaaaaggaggaaaaggaatgggagacagagactacagacttactccttaatgaagctgtgctctacaaagaggagaaaaattgggacggtagctagcatgggaatatccaatgactgatccacgtggatgcaaacgcctgccccctggcctcaattcaggacaccttggcatggccaccccaagtccagggatctctgtgggctccgccaagattctggttgcagctgtactactgttgaactcctccggctgctcaatcctgctcctctctctccccagcaagtacacacaactccgagttgaaccccacccaagacacttcccttccccgcacccccaaataaaccacttccattggaatcctgtctcagaatctgtttctggggaacccaaacttagcccaacagcaggtctcaaggctgacaggaatgtgggaaattgagggaaagtgtgggaaccagaggaagatgggctgtgggatgccactaagcaggtgggggggcctggatccagcgcacaaggcgagggcctgccttaggaaaggggcttgtcacttgcagcacttggtgcaggattcaggtaggtggcatctgcagaagatcccttctgaataattctattttgtcagtgaaccagaagcaaggttactactaagcatgaagactggggagaagtggggtttggagaagaaaggagactggtttgggsgcggggggttgcagggasgaaagtgaacagactagacagtgagtcacaggacaactgcgggaggacatcctcaaggtgcctaagaaaacaatagtcaatctggacatatacctggtgaaactgtatttcaaggagaaaggtaaaataaagatatttttagataaacacaaaaggagagactgtcccaccaacaactctcacaaaaggacttttgaaatggatgcatttcaggaagaaagaaagtgatcccagacggaagatctgggcaggaaaaaggagtgagaatcttacagaaggagacagggagttgtggatccatcaggcctgaaatgtgatggtcagttggtcagtttttgtgagtcaacatattgctcttttttctctctctttttttttttttttttttttggattggtgaggtctggctatgttgcccaggctggtcccgaacccctgagttcaagcgatcctcccacctckgcctcccaaagtgctgggattacaggcatgggccaccacgcctggctcaacacattgctctctaatgttattgttgcttgccccaagttccgtggagtcttctatcacttgcagctgagcaccctgacggatctacgcagccacttgagagcgcgctttgccgcgtgcttggcgagaaggcgccaatcaaccctttaatccaatcatgcaatgattagggccttccaggtggaggtggagctgaggtccttccgggagagagaaaaagcctcacagcaggcttactcctataaggtgacacagacacaatctcgtcacaggatgaggagtagggaaatctcccaacttgggcacacagcgtgtgatctcgccttgcttttctccctggaggtgcagcatcatcacaggtgttggatggacagctggcaaccaatgtaaatgcctgtttccccagctctaataaacgggcttaacagcacatgccctcgtgcaccttaggaagccacatgtattgcagctgggccactgggaaaaggcacttctttctttcagaataagggccaactratgtatyatgaatgacccaacaaccctacctcttaaaacgctgtctgagagcctgagcaaactggacctcgccagtggctggtgagagctctgtgttaatggtgctggattcctgcgggggcctgtgattccccgctccgtagagagtaggacagcaccccgcctcctccggacattgctgcacagtgggtgagccacctgctgccctgaacaggaagggaaggaggagccgtcggagctt

SEQ ID NO: 8 - DNA, 2986 bp, Homo sapiens
gcgccccagtcgacgctgagctcctctgctactcagagttgcaacctcagcctcgctatggctcccagcagcccccggcccgcgctgcccgcactcctggtcctgctcggggctctgttcccaggacctggcaatgcccagacatctgtgtccccctcaaaagtcatcctgccccggggaggctccgtgctggtgacatgcagcacctcctgtgaccagcccaagttgttgggcatagagaccccgttgcctaaaaaggagttgctcctgcctgggaacaaccggaaggtgtatgaactgagcaatgtgcaagaagatagccaaccaatgtgctattcaaactgccctgatgggcagtcaacagctaaaaccttcctcaccgtgtactggactccagaacgggtggaactggcacccctcccctcttggcagccagtgggcaagaaccttaccctacgctgccaggtggagggtggggcaccccgggccaacctcaccgtggtgctgctccgtggggagaaggagctgaaacgggagccagctgtgggggagcccgctgaggtcacgaccacggtgctggtgaggagagatcaccatggagccaatttctcgtgccgcactgaactggacctgcggccccaagggctggagctgtttgagaacacctcggccccctaccagctccagacctttgtcctgccagcgactcccccacaacttgtcagcccccgggtcctagaggtggacacgcaggggaccgtggtctgttccctggacgggctgttcccagtctcggaggcccaggtccacctggcactgggggaccagaggttgaaccccacagtcacctatggcaacgactccttctcggccaaggcctcagtcagtgtgaccgcagaggacgagggcacccagcggctgacgtgtgcagtaatactggggaaccagagccaggagacactgcagacagtgaccatctacagctttccggcgcccaacgtgattctgacgaagccagaggtctcagaagggaccgaggtgacagtgaagtgtgaggcccaccctagagccaaggtgacgctgaatggggttccagcccagccactgggcccgagggcccagctcctgctgaaggccaccccagaggacaacgggcgcagcttctcctgctctgcaaccctggaggtggccggccagcttatacacaagaaccagacccgggagcttcgtgtcctgtatggcccccgactggacgagagggattgtccgggaaactggacgtggccagaaaattcccagcagactccaatgtgccaggcttgggggaacccattgcccgagctcaagtgtctaaaggatggcactttcccactgcccatcggggaatcagtgactgtcactcgagatcttgagggcacctacctctgtcgggccaggagcactcaaggggaggtcacccgcgaggtgaccgtgaatgtgctctccccccggtatgagattgtcatcatcactgtggtagcagccgcagtcataatgggcactgcaggcctcagcacgtacctctataaccgccagcggaagatcaagaaatacagactacaacaggcccaaaaagggacccccatgaaaccgaacacacaagccacgcctccctgaacctatcccgggacagggcctcttcctcggccttcccatattggtggcagtggtgccacactgaacagagtggaagacatatgccatgcagctacacctaccggccctgggacgccggaggacagggcattgtcctcagtcagatacaacagcatttggggccatggtacctgcacacctaaaacactaggccacgcatctgatctgtagtcacatgactaagccaagaggaaggagcaagactcaagacatgattgatggatgttaaagtctagcctgatgagaggggaagtggtgggggagacatagccccaccatgaggacatacaactgggaaatactgaaacttgctgcctattgggtatgctgaggcccacagacttacagaagaagtggccctccatagacatgtgtagcatcaaaacacaaaggcccacacttcctgacggatgccagcttgggcactgctgtctactgaccccaacccttgatgatatgtatttattcatttgttattttaccagctatttattgagtgtcttttatgtaggctaaatgaacataggtctctggcctcacggagctcccagtccatgtcacattcaaggtcaccaggtacagttgtacaggttgtacactgcaggagagtgcctggcaaaaagatcaaatggggctgggacttctcattggccaacctgcctttccccagaaggagtgatttttctatcggcacaaaagcactatatggactggtaatggttcacaggttcagagattacccagtgaggccttattcctcccttccccccaaaactgacacctttgttagccacctccccacccacatacatttctgccagtgttcacaatgacactcagcggtcatgtctggacatgagtgcccagggaatatgcccaagctatgccttgtcctcttgtcctgtttgcatttcactgggagcttgcactattgcagctccagtttcctgcagtgatcagggtcctgcaagcagtggggaagggggccaaggtattggaggactccctcccagctttggaagggtcatccgcgtgtgtgtgtgtgtgtatgtgtagacaagctctcgctctgtcacccaggctggagtgcagtggtgcaatcatggttcactgcagtcttgaccttttgggctcaagtgatcctcccacctcagcctcctgagtagctgggaccataggctcacaacaccacacctggcaaatttgattttttttttttttttcagagacggggtctcgcaacattgcccagacttcctttgtgttagttaataaagctttctcaactgcc

SEQ ID NO: 9 - DNA, 1243 bp, Homo sapiens
ctttttgccatggggtctctgttccctctgtcgctgctgttttttttggcggccgcctacccgggagttgggagcgcgctgggacgccggactaagcgggcgcaaagccccaagggtagccctctcgcgccctccgggacctcagtgcccttctgggtgcgcatgagcccggagttcgtggctgtgcagccggggaagtcagtgcagctcaattgcagcaacagctgtccccagccgcagaattccagcctccgcaccccgctgcggcaaggcaagacgctcagagggccgggttgggtgtcttaccagctgctcgacgtgagggcctggagctccctcgcgcactgcctcgtgacctgcgcaggaaaaacacgctgggccacctccaggatcaccgcctacaaaccgccccacagcgtgattttggagcctccggtcttaaagggcaggaaatacactttgcgctgccacgtgacgcaggtgttcccggtgggctacttggtggtgaccctgaggcatggaagccgggtcatctattccgaaagcctggagcgcttcaccggcctggatctggccaacgtgaccttgacctacgagtttgctgctggaccccgcgacttctggcagcccgtgatctgccacgcgcgcctcaatctcgacggcctggtggtccgcaacagctcggcacccattacactgatgctcgcttggagccccgcgcccacagctttggcctccggttccatcgctgcccttgtagggatcctcctcactgtgggcgctgcgtacctatgcaagtgcctagctatgaagtcccaggcgtaaagggggatgttctatgccggctgagcgagaaaaagaggaatatgaaacaatctggggaaatggccatacatggtggctgacgcctgtaatcccagcactttgggaggccgaggcaggagaatcgcttgagcccaggagttcgagaccagcctggacaacatagtgagaccccgtctatgcaaaaaatacacaaattagcctggtgtggtggcccgcacctgtggtcccagctacccgggaggctgagttgggaggatcctttgagccctgaaagtcgaggttgcagtgagccttgatcgtgccactgcactccagcctgggggacagagcacgaccctgtctccaaaaataaaataaaaataaaaataaatattggcgggggaaccctctggaatcaataaaggcttccttaaccagc

SEQ ID NO: 10 - DNA, 3000 bp, Homo sapiens
ccgtcctctagcccagctcctcggctcgcgctctcctcgcctcctgtgctttccccgccgcggcgatgccagggccttcgccagggctgcgccgggcgctactcggcctctgggctgctctgggcctggggctcttcggcctctcagcggtctcgcaggagcccttctgggcggacctgcagcctcgcgtggcgttcgtggagcgcgggggctcgctgtggctgaattgcagcaccaactgccctcggccggagcgcggtggcctggagacctcgctgcgccgaaacgggacccagaggggtttgcgttggttggcgcggcagctggtggacattcgcgagccggagactcagcccgtctgcttcttccgctgcgcgcggcgcacactacaggcgcgtgggctcattcgcactttccagcgaccagatcgcgtagagctgatgccgctgcctccctggcagccggtgggcgagaacttcaccctgagctgtagggtccccggcgccgggccccgtgcgagcctcacgctgaccctgctgcggggcgcccaggagctgatccgccgcagcttcgccggtgaaccaccccgagcgcggggcgcggtgctcacagccacggtactggctcggagggaggaccatggagccaatttctcgtgtcgcgccgagctggacctgcggccgcacggactgggactgtttgaaaacagctcggcccccagagagctccgaaccttctccctgtctccggatgccccgcgcctcgctgctccccggctcttggaagttggctcggaaaggcccgtgagctgcactctggacggactgtttccagcctcagaggccagggtctacctcgcactgggggaccagaatctgagtcctgatgtcaccctcgaaggggacgcattcgtggccactgccacagccacagctagcgcagagcaggagggtgccaggcagctgatctgcaacgtcaccctggggggcgaaaaccgggagacccgggagaacgtgaccatctacagcttcccggcaccactcctgaccctgagcgaacccagcgtctccgaggggcagatggtgacagtaacctgcgcagctgggacccaagctctggtcacactggagggagttccagccgcggtcccggggcagcccgcccagcttcagctaaatgccaccgagaacgacgacagacgcagcttcttctgcgacgccaccctcgatgtggacggggagaccctgatcaagaacaggagcgcagagcttcgtgtcctatacgctccccggctagacgattcggactgccccaggagttggacgtggcccgagggcccagagcagacgctgcgctgcgaggcccgcgggaacccagaaccctcagtgcactgtgcgcgctccgacggcggggccgtgctggctctgggcctgctgggtccagtcactcgggcgctctcaggcacttaccgctgcaaggcggccaatgatcaaggcgaggcggtcaaggacgtaacgctaacggtggagtacgcaccagcgctggacagcgtgggctgcccagaacgcattacttggctggagggaacagaagcctcgctgagctgtgtggcgcacggggtaccgccgcctgatgtgatctgcgtgcgctctggagaactcggggccgtcatcgaggggctgttgcgtgtggcccgggagcatgcgggcacttaccgctgcgaagccaccaaccctcggggctctgcggccaaaaatgtggccgtcacggtggaatatggccccaggtttgaggagccgagctgccccagcaattggacatgggtggaaggatctgggcgcctgttttcctgtgaggtcgatgggaagccacagccaagcgtgaagtgcgtgggctccgggggcgccactgagggggtgctgctgccgctggcacccccagaccctagtcccagagctcccagaatccctagagtcctggcacccggtatctacgtctgcaacgccaccaaccgccacggctccgtggccaaaacagtcgtcgtgagcgcggagtcgccaccggagatggatgaatctacctgcccaagtcaccagacgtggctggaaggggctgaggcttccgcgctggcctgcgccgcccggggtcgcccttccccaggagtgcgctgctctcgggaaggcatcccatggcctgagcagcagcgcgtgtcccgagaggacgcgggcacttaccactgtgtggccaccaatgcgcatggcacggactcccggaccgtcactgtgggcgtggaataccggccagtggtggccgaacttgctgcctcgccccctggaggcgtgcgcccaggaggaaacttcacgttgacctgccgcgcggaggcctggcctccagcccagatcagctggcgcgcgcccccgggggccctcaacatcggcctgtcgagcaacaacagcacactgagcgtggcaggcgccatgggaagccacggcggcgagtacgagtgcgcacgcaccaacgcgcacgggcgccacgcgcggcgcatcacggtgcgcgtggccggtccgtggctatgggtcgccgtgggcggcgcggcggggggcgcggcgctgctggccgcgggggccggcctggccttctacgtgcagtccaccgcctgcaagaagggcgagtacaacgtgcaggaggccgagagctcaggcgaggccgtgtgtctcaacggagcgggcggcggcgctggcggggcggcaggcgcggagggcggacccgaggcggcggggggcgcggccgagtcgccggcggagggcgaggtcttcgccatacagctgacatcggcgtgagccgctcccctctccccgcgggccgggggacgccccccagactcacacgggggcttatttattgctttatttatttacttattcatttatttatgtattcaactccaagggcgtcacccccattttctacccatcccctcaataaagtttttataaagga

SEQ ID NO: 11 - DNA, 2372 bp, Homo sapiens
gagaaatggcgtggcaggggacccagcgagcccagagggattttgccgctgcttcctctacccctgtatttcacgcagctctctaaattgactcagctccaggctagtgtgagaaacaccaacagcaggcccatctcagatcttcactatggcaacttatgcaagaaactgttgaattagacccgtttcctatagatgagaaaccatacaagctgtggtatttatgagcctccatttcttatactactgcagtgaaccaacattggatgtgaaaattgccttttgtcagggattcgataaacaagtggatgtgtcatatattgccaaacattacaacatgagcaaaagcaaagttgacaaccagttctacagtgtggaagtgggagactcaaccttcacagttctcaagcgctaccagaatctaaagcctattggctctggggctcagggcatagtttgtgccgcgtatgatgctgtccttgacagaaatgtggccattaagaagctcagcagaccctttcagaaccaaacacatgccaagagagcgtaccgggagctggtcctcatgaagtgtgtgaaccataaaaacattattagtttattaaatgtcttcacaccccagaaaacgctggaggagttccaagatgtttacttagtaatggaactgatggatgccaacttatgtcaagtgattcagatggaattagaccatgagcgaatgtcttacctgctgtaccaaatgttgtgtggcattaagcacctccattctgctggaattattcacagggatttaaaaccaagtaacattgtagtcaagtctgattgcacattgaaaatcctggactttggactggccaggacagcaggcacaagcttcatgatgactccatatgtggtgacacgttattacagagcccctgaggtcatcctggggatgggctacaaggagaacgtggatatatggtctgtgggatgcattatgggagaaatggttcgccacaaaatcctctttccaggaagggactatattgaccagtggaataaggtaattgaacaactaggaacaccatgtccagaattcatgaagaaattgcaacccacagtaagaaactatgtggagaatcggcccaagtatgcgggactcaccttccccaaactcttcccagattccctcttcccagcggactccgagcacaataaactcaaagccagccaagccagggacttgttgtcaaagatgctagtgattgacccagcaaaaagaatatcagtggacgacgccttacagcatccctacatcaacgtctggtatgacccagccgaagtggaggcgcctccacctcagatatatgacaagcagttggatgaaagagaacacacaattgaagaatggaaagaacttatctacaaggaagtaatgaattcagaagaaaagactaaaaatggtgtagtaaaaggacagccttctccttcagcacaggtgcagcagtgaacagcagtgagagtctccctccatcctcgtctgtcaatgacatctcctccatgtccaccgaccagaccctggcatctgacactgacagcagcctggaagcctcggcaggacccctgggttgttgcaggtgactagccgcctgcctgcgaaacccagcgttcttcaggagatgatgtgatggaacacacacacacgcagacacacacacacacacaaatgcagacacacaacatcaagaaaacagcaagggagagaatccaagcctaaaattaaataaatctttcagcctgcttcttccccagggttctgtattgcagctaagctcaaatgtatatttaacttctagttgctcttgctttggtcttcttccaatgatgcttactacagaaagcaaatcagacacaattagagaagccttttccataaagtgtaattttaatggctgcaaaaccggcaacctgtaactgcccttttaaatggcatgacaaggtgtgcagtggccccatccagcatgtgtgtgtctctatcttgcatctacctgctccttggcctagtcagatggatgtagatacagatccgcatgtgtctgtattcatacagcactacttacttagagatgctactgtcagtgtcctcagggctctaccaagacataatgcactggggtaccacatggtccatttcatgtgatctattactctgacataaacccatctgtaatatattgccagtatataagctgtttagtttgttaattgattaaactgtatgtcttataagaaaacatgtaaagggggaatatatggggggagtgagctctctcagacccttgaagatgtagcttccaaatttgaatggattaaatggcacctgtatacca

SEQ ID NO: 12 - DNA, 3189 bp, Homo sapiens
cgctgaattctaggggaggatggcgcccccatcatcacgttcccagagttttcggggttcaaacacatcccagatgaagacttcctgaatgtcatgacctacctgactagcatccccagtgtggaggctgccagcattggattcattgttgttatcgacagacgaagagacaagtggagctccgtaaaggcatccttgacacgaatagctgtggcatttccaggaaacttacagctcatattcatccttcgtccatctcgctttatccagaggacattcactgacattggcattaaatactatcgaaatgagtttaaaacgaaagtgccgatcatcatggtaaactctgtctctgaccttcacggctacatcgacaaaagccaactgacccgggaattaggggggactttggaatatcgccacggtcagtgggtaaatcaccgcactgccatcgaaaactttgccttgaccttgaagaccactgcccagatgctgcagacgtttgggtcctgcctggccacagcagagctgcccagaagcatgctatccacggaagaccttctcatgtcccacacaaggcagcgggacaagctgcaggatgagctgaaattacttggaaagcaggggaccacattgctgtcatgcatccaagaaccagcaaccaaatgtcccaacagcaaactcaatctcaaccaacttgagaatgtaactaccatggaaaggttattagttcaactggatgaaacagaaaaagcctttagtcacttttggtctgagcatcatctgaagcttaaccagtgcctacaactacagcattttgagcacgatttttgtaaggctaagcttgccctggataatttgctggaagagcaagcagagtttacaggcattggagacagcgtgatgcacgtggagcagattcttaaggaacacaaaaaactggaggaaaaaagccaggagtccctggaaaaggcccagctgctggcactggttggggaccagctcatccaaagccaccattatgcagcagatgccatcaggccccggtgtgtggagctcaggcacctctgtgacgatttcatcaatggaaacaagaaaaaatgggacattttaggaaagtccttagagtttcatagacagctggacaaggtcagccaatggtgtgaggcaggaatctacctcttggcttcccaagctgtagacaagtgccagtctcgagaaggggttgatatcgccttgaacgacattgcgacattcctgggcacagtcaaggagtacccgttgctcagccccaaggagttttacaacgagtttgagttgctgctcaccctcgatgcaaaggccaaagcccagaaagttttgcagaggctggatgatgtccaggaaatatttcacaagaggcaagtgagtctgatgaaactggcagccaaacagactcgtccagtgcaacctgtggccccacatcctgagtcttcaccaaaatgggtgtcatcaaaaaccagccagccctccacctcggtccctctagctcgtcctctgagaacgtctgaggaaccttatacggagacagagttgaactcccggggaaaggaagatgatgagactaaatttgaagtcaagagtgaagaaatctttgaaagccatcatgaaagggggaaccctgagctggagcagcaggccaggctcggagacctttccccccgcaggcgcattatacgtgacttgcttgagactgaagagatttacataaaagagattaaaagcataattgatggatatatcactccaatggattttatttggctaaagcatctaattccagatgttcttcagaataacaaggactttctctttgggaatattagagaactttacgaatttcacaacaggacttttctaaaagagttggaaaagtgtgctgagaaccctgaacttctggcacattgctttctcaagagaaaagaagatcttcagatatattttaaataccataagaatctgccccgagctagggcaatctggcaagagtgtcaagactgcgcctactttggggtatgccagcgccaactggatcacaatctccctctttttaagtatctcaaaggaccaagccagagacttataaaataccagatgctgttgaagggtctgctggatttcgagtctcctgaagatatggagatagacccaggtgaactaggaggctcggctaaggatgggccaaagagaaccaaagattcagcattctcaactgaactacaacaagctttggcagtgatagaggatttgatcaagtcctgtgagttggctgtggacctagcagcagtgactgaatgtccggacgatattggaaaactaggcaagctgttgctgcacggccctttcagcgtctggacaattcacaaggatcgttataaaatgaaggatttgattcgatttaaacccagccagaggcaaatctacctatttgaaaggggaatagtgttctgtaagatacgaatggagcctggggaccagggattatctcctcattacagcttcaagaaggccatgaagctgatgacactttcaattcgccagcttggaagggggagccatagaaagtttgagattgccagtcgaaatggacttgagaaatacatcctgcaggcagcttcaaaagaaatcagagactgttggttttcagaaataagtaaattattgatggaacaacaaaataatatcaaagaccaaggaaatccacagtttgaaatgagcacgagcaaaggcagtggagcaggatccggaccatggattaaaaatatggaaagagctaccactagcaaggaagacccggcctccagcacaggagggattaaaggctgctccagcagggagtttagctccatggacacctttgaagactgtgaaggcgcagaagacatggaaaaggagagcagtgctctgagtctcgcgggccttttccagtcggacgacagtcacgaaacctgttcctccaaatctgctttcctggagaggggagaaagcagccagggagaaaaagaagaacgcgatgaggaggaaacggcgacccgcagcaccgaggaggagcgcgctggggcgtccacgggccggctggctcctgcgggggcgacggctggtttccaggcgagggcgctgcgcccgaggacctccgcccaggagagctga

SEQ ID NO: 13 - DNA, 4772 bp, Homo sapiens
ttgggcggagatgcctttaaaaaatcatccaccgcagcggtagaaacagttttgtttggctttatttatacggaatggtttttcagtgaaatgctgtcttgcttaaaagaagagatgcctccccaggagctcacccggcgactggccacagtgatcactcatgtcgatgaaattatgcagcaggaagtcagacccctgatggcggtggagataatagaacaacttcacagacaatttgccattctttcaggaggccgaggggaggatggcgcccccatcatcacgttcccagagttttcggggttcaaacacatcccagatgaagacttcctgaatgtcatgacctacctgactagcatccccagtgtggaggctgccagcattggattcattgttgttatcgacagacgaagagacaagtggagctccgtaaaggcatccttgacacgaatagctgtggcatttccaggaaacttacagctcatattcatccttcgtccatctcgctttatccagaggacattcactgacattggcattaaatactatcgaaatgagtttaaaacgaaagtgccgatcatcatggtaaactctgtctctgaccttcacggctacatcgacaaaagccaactgacccgggaattaggggggactttggaatatcgccacggtcagtgggtaaatcaccgcactgccatcgaaaactttgccttgaccttgaagaccactgcccagatgctgcagacgtttgggtcctgcctggccacagcagagctgcccagaagcatgctatccacggaagaccttctcatgtcccacacaaggcagcgggacaagctgcaggatgagctgaaattacttggaaagcaggggaccacattgctgtcatgcatccaagaaccagcaaccaaatgtcccaacagcaaactcaatctcaaccaacttgagaatgtaactaccatggaaaggttattagttcaactggatgaaacagaaaaagcctttagtcacttttggtctgagcatcatctgaagcttaaccagtgcctacaactacagcattttgagcacgatttttgtaaggctaagcttgccctggataatttgctggaagagcaagcagagtttacaggcattggagacagcgtgatgcacgtggagcagattcttaaggaacacaaaaaactggaggaaaaaagccaggagcccctggaaaaggcccagctgctggcactggttggggaccagctcatccaaagccaccattatgcagcagatgccatcaggccccggtgtgtggagctcaggcacctctgtgacgatttcatcaatggaaacaagaaaaaatgggacattttaggaaagtccttagagtttcatagacagctggacaaggtcagccaatggtgtgaggcaggaatctacctcttggcttcccaagctgtagacaagtgccagtctcgagaaggggttgatatcgccttgaacgacattgcgacattcctgggcacagtcaaggagtacccgttgctcagccccaaggagttttacaacgagtttgagttgctgctcaccctcgatgcaaaggccaaagcccagaaagttttgcagaggctggatgatgtccaggaaatatttcacaagaggcaagtgagtctgatgaaactggcagccaaacagactcgtccagtgcaacctgtggccccacatcctgagtcttcaccaaaatgggtgtcatcaaaaaccagccagccctccacctcggtccctctagctcgtcctctgagaacgtctgaggaaccttatacggagacagagttgaactcccggggaaaggaagatgatgagactaaatttgaagtcaagagtgaagaaatctttgaaagccatcatgaaagggggaaccctgagctggagcagcaggccaggctcggagacctttccccccgcaggcgcattatacgtgacttgcttgagactgaagagatttacataaaagagattaaaagcataattgatggatatatcactccaatggattttatttggctaaagcatctaattccagatgttcttcagaataacaaggactttctctttgggaatattagagaactttacgaatttcacaacaggacttttctaaaagagttggaaaagtgtgctgagaaccctgaacttctggcacattgctttctcaagagaaaagaagatcttcagatatattttaaataccataagaatctgccccgagctagggcaatctggcaagagtgtcaagactgcgcctactttggggtatgccagcgccaactggatcacaatctccctctttttaagtatctcaaaggaccaagccagagacttataaaataccagatgctgttgaagggtctgctggatttcgagtctcctgaagatatggagatagacccaggtgaactaggaggctcggctaaggatgggccaaagagaaccaaagattcagcattctcaactgaactacaacaagctttggcagtgatagaggatttgatcaagtcctgtgagttggctgtggacctagcagcagtgactgaatgtccggacgatattggaaaactaggcaagctgttgctgcacggccctttcagcgtctggacaattcacaaggatcgttataaaatgaaggatttgattcgatttaaacccagccagaggcaaatctacctatttgaaaggggaatagtgttctgtaagatacgaatggagcctggggaccagggattatctcctcattacagcttcaagaagaccatgaagctgatgacactttcaattcgccagcttggaagggggagccatagaaagtttgagattgccagtcgaaatggacttgagaaatacatcctgcaggcagcttcaaaagaaatcagagactgttggttttcagaaataagtaaattattgatggaacaacaaaataatatcaaagaccaaggaaatccacagtttgaaatgagcacgagcaaaggcagtggagcaggatccggaccatggattaaaaatatggaaagagctaccactagcaaggaagacccggcctccagcacaggagggattaaaggctgctccagcagggagtttagctccatggacacctttgaagactgtgaaggcgcagaagacatggaaaaggagagcagtgctctgagtctcgcgggccttttccagtcggacgacagtcacgaaacctgttcctccaaatctgctttcctggagaggggagaaagcagccagggagaaaaagaagaacgcgatgaggaggaaacggcgacccgcagcaccgaggaggagcgcgctggggcgtccacgggccggctggctcctgcgggggcgacggctggtttccaggcgagggcgctgcgcccgaggacctccgcccaggagagctgacctccctgcggacgcccccgctcctcggctccagagcgcccgcattcccgggagaggcggtgtgggggcccgggccctgcccagctacgcagaaagcagccggagcctcggcggcggcagaaaggggacaaccagggcctcctccgaggagcccgaggggtgtcctgggtgcgcgcctagctccgcacgggggacctcggagctgctctaaggcgcctgcagaggcgagcagagcccgcagcccacgccttctcgaccgcgcacttcgacattcggagccgggcaattctttgctgcgtgggcttctctgtgctcccacggtaggatgtttagtagcacccctggcctctacccactaggtgccaggaatgcgccaccccatcctccaccccgcccccaaatcgtgacaatcaaaaatgcctgcagacacgcccgcatttctccagggcggggtgggaatcggttgagagccgcttagcccgagccttggaggagccggagccgctcaaacccggcgggggccgcagactgggagctcccggtccgcctcccagcatccctgcgagcgttcatggggtgttcgtgttagtgccaagattgcttcgttgtagagagagttcgttccaagttactttctgaggtattttatgtatcgatttattagtttttaaatgagttttgttagtttcagttgtattttatttttagttttattagttgattttcatttctttgtagctttctggttatttaattttatagtttcagttactggtttatagttactttattttcaaagttatttagttgttcattttcagttatttatatgtagttgttttgttttaggagttacagatgttcaaattaatttgcttggaatttatttatttatttatttatttatttttcgagacggagtctcgctctgtcgcccaggctggagtgcagtggtgtgatctcggctcactgcaaaccgcctcccgggttcacgccattctcctgcctcagcctcctgagtagctgggactacaggcgcccgccaccacgcccggctaattttttatttggatttttagtagagacggggtttccccgtgttagccaggatggtctcgatctcctgacctcgtgatccccctgcctcggcctcccaaagtgctgggattacaggcgtgagccaccgcgcccagccggaatttatttttaattatctttacaattattatctgagttatttaccttcatagttatttcactttatcttattggagtttttgagttatttatttttacagtaacttatttgactattaaacactcactggaagttcatg

SEQ ID NO: 14 - DNA, 7217 bp, Homo sapiens
gcccacgaagaggtacgattccggagaatcgcgaggcagagcgggagcgcgcagccaggtggaaactaattctaagccagactgctggagatcaccctgttctagtgtgtggaggcttccaccaggagtctggagtgcaatggcacgatctcggctcactgcaacctccacctcccaggttcaagcgattctcctgcctcagcctcccaagtagctgggattacaggcgcattggagtgactgtctggcatcaccaagatgacactccacgccacccggggggctgcactcctctcttgggtgaacagtctacacgtggctgaccctgtggaggctgtgctgcagctccaggactgcagcatcttcatcaagatcattgacagaatccatggcactgaagagggacagcaaatcttgaagcagccggtgtcagagagactggactttgtgtgcagttttctgcagaaaaatcgaaaacatccctcttccccagaatgcctggtatctgcacagaaggtgctagagggatcagagctggaactggcgaagatgaccatgctgctcttataccactctaccatgagctccaaaagtcccagggactgggaacagtttgaatataaaattcaggctgagttggctgtcattcttaaatttgtgctggaccatgaggacgggctaaaccttaatgaggacctagagaacttcctacagaaagctcctgtgccttctacctgttctagcacattccctgaagagctctccccacctagccaccaggccaagagggagattcgcttcctagagctacagaaggttgcctcctcttccagtgggaacaactttctctcaggttctccagcttctcccatgggtgatatcctgcagaccccacagttccagatgagacggctgaagaagcagcttgctgatgagagaagtaatagggatgagctggagctggagctagctgagaaccgcaagctcctcaccgagaaggatgcacagatagccatgatgcagcagcgcattgaccgcctagccctgctgaatgagaagcaggcggccagcccactggagcccaaggagcttgaggagctgcgtgacaagaatgagagccttaccatgcggctgcatgaaaccctgaagcagtgccaggacctgaagacagagaagagccagatggatcgcaaaatcaaccagctttcggaggagaatggagacctttcctttaagctgcgggagtttgccagtcatctgcagcagctacaggatgccctcaatgagctgacggaggagcacagcaaggccactcaggagtggctagagaagcaggcccagctggagaaggagctcagcgcagccctgcaggacaagaaatgccttgaagagaagaacgaaatccttcagggaaaactttcacagctggaagaacacttgtcccagctgcaggataacccaccccaggagaagggcgaggtgctgggtgatgtcttgcagctggaaaccttgaagcaagaggcagccactcttgctgcaaacaacacacagctccaagccagggtagagatgctggagactgagcgaggccagcaggaagccaagctgcttgctgagcggggccacttcgaagaagaaaagcagcagctgtctagcctgatcactgacctgcagagctccatctccaacctcagccaggccaaggaagagctggagcaggcctcccaggctcatggggcccggttgactgcccaggtggcctctctgacctctgagctcaccacactcaatgccaccatccagcaacaggatcaagaactggctggcctgaagcagcaggccaaagagaagcaggcccagctagcacagaccctccaacagcaagaacaggcctcccagggcctccgccaccaggtggagcagctaagcagtagcctgaagcagaaggagcagcagttgaaggaggtagcggagaagcaggaggcaactaggcaggaccatgcccagcaactggccactgctgcagaggagcgagaggcctccttaagggagcgggatgcggctctcaagcagctggaggcactggagaaggagaaggctgccaagctggagattctgcagcagcaacttcaggtggctaatgaagcccgggacagtgcccagacctcagtgacacaggcccagcgggagaaggcagagctgagccggaaggtggaggaactccaggcctgtgttgagacagcccgccaggaacagcatgaggcccaggcccaggttgcagagctagagttgcagctgcggtctgagcagcaaaaagcaactgagaaagaaagggtggcccaggagaaggaccagctccaggagcagctccaggccctcaaagagtccttgaaggtcaccaagggcagccttgaagaggagaagcgcagggctgcagatgccctggaagagcagcagcgttgtatctctgagctgaaggcagagacccgaagcctggtggagcagcataagcgggaacgaaaggagctggaagaagagagggctgggcgcaaggggctggaggctcgattactgcagcttggggaggcccatcaggctgagactgaagtcctgcggcgggagctggcagaggccatggctgcccagcacacagctgagagtgagtgtgagcagctcgtcaaagaagtagctgcctggcgtgacgggtatgaggatagccagcaagaggaggcacagtatggcgccatgttccaggaacagctgatgactttgaaggaggaatgtgagaaggcccgccaggagctgcaggaggcaaaggagaaggtggcaggcatagaatcccacagcgagctccagataagccggcagcagaacaaactagctgagctccatgccaacctggccagagcactccagcaggtccaagagaaggaagtcagggcccagaagcttgcagatgacctctccactctgcaggaaaagatggctgccaccagcaaagaggtggcccgcttggagaccttggtgcgcaaggcaggtgagcagcaggaaacagcctcccgggagttagtcaaggagcctgcgagggcaggagacagacagcccgagtggctggaagagcaacagggacgccagttctgcagcacacaggcagcgctgcaggctatggagcgggaggcagagcagatgggcaatgagctggaacggctgcgggccgcgctgatggagagccaggggcagcagcaggaggagcgtgggcagcaggaaagggaggtggcgcggctgacccaggagcggggccgtgcccaggctgaccttgccctggagaaggcggccagagcagagcttgagatgcggctgcagaacgccctcaacgagcagcgtgtggagttcgctaccctgcaagaggcactggctcatgccctgacggaaaaggaaggcaaggaccaggagttggccaagcttcgtggtctggaggcagcccagataaaagagctggaggaacttcggcaaaccgtgaagcaactgaaggaacagctggctaagaaagaaaaggagcacgcatctggctcaggagcccaatctgaggctgctggcaggacagagccaacaggccccaagctggaagcactgcgggcagaggtgagcaagctggaacagcaatgccagaagcagcaggagcaggctgacagcctggaacgcagcctcgaggctgagcgggcctcccgggctgagcgggacagtgctctggagactctgcagggccagttagaggagaaggcccaggagctagggcacagtcagagtgccttagcctcggcccaacgggagttggctgccttccgcaccaaggtacaagaccacagcaaggctgaagatgagtggaaggcccaggtggcccggggccggcaagaggctgagaggaaaaatagcctcatcagcagcttggaggaggaggtgtccatcctgaatcgccaggtcctggagaaggagggggagagcaaggagttgaagcggctggtgatggccgagtcagagaagagccagaagctggaggagagctgcgcctgctgcaggcagagacagccagcaacagtgccagagctgcagaacgcagctctgctctgcgggaggaggtgcagagcctccgggagggaggctgagaaacagcgggtggcttcagagaacctgcggcaggagctgacctcacaggctgagcgtgcggaggagctgggccaagaattgaaggcgtggcaggagaagttcttccagaaagagcaggccctctccaccctgcagctcgagcacaccagcacacaggccctggtgagtgagctgctgccagctaagcacctctgccagcagctgcaggccgagcaggccgctgccgagaaacgccaccgtgaggagctggagcagagcaagcaggccgctgggggactgcgggcagagctgctgcgggcccagcgggagcttggggagctgattcctctgcggcagaaggtggcagagcaggagcgaacagctcagcagctgcgggcagagaaggccagctatgcagagcagctgagcatgctgaagaaggcgcatggcctgctggcagaggagaaccgggggctgggtgagcgggccaaccttggccggcagtttctggaagtggagttggaccaggcccgggaaaagtatgtccaagagttggcagccgtacgtgctgatgctgagacccgtctggctgaggtgcagcgagaagcacagagcactgcccgggagctggaggtgatgactgccaagtatgagggtgccaaggtcaaggtcctggaggagaggcagcggttccaggaagagaggcagaaactcactgcccaggtggaagaactgagtaagaaactggctgactctgaccaagccagcaaggtgcagcagcagaagctgaaggctgtccaggctcagggaggcgagagccagcaggaggcccagcgcttccaggcccagctgaatgaactgcaagcccagttgagccagaaggagcaggcagctgagcactataagctgcagatggagaaagccaaaacacattatgatgccaagaagcagcagaaccaagagctgcaggagcagctgcggagcctggagcagctgcagaaggaaaacaaagagctgcgagctgaagctgaacggctgggccatgagctacagcaggctgggctgaagaccaaggaggctgaacagacctgccgccaccttactgcccaggtgcgcagcctggaggcacaggttgcccatgcagaccagcagcttcgagacctgggcaaattccaggtggcaactgatgctttaaagagccgtgagccccaggctaagccccagctggacttgagtattgacagcctggatctgagctgcgaggaggggaccccactcagtatcaccagcaagctgcctcgtacccagccagacggcaccagcgtccctggagaaccagcctcacctatctcccagcgcctgccccccaaggtagaatccctggagagtctctacttcactcccatccctgctcggagtcaggcccccctggagagcagcctggactccctgggagacgtcttcctggactcgggtcgtaagacccgctccgctcgtcggcgcaccacgcagatcatcaacatcaccatgaccaagaagctagatgtggaagagccagacagcgccaactcatcgttctacagcacgcggtctgctcctgcttcccaggctagcctgcgagccacctcctctactcagtctctagctcgcctgggttctcccgattatggcaactcagccctgctcagcttgcctggctaccgccccaccactcgcagttctgctcgtcgttcccaggccggggtgtccagtggggcccctccaggaaggaacagcttctacatgggcacttgccaggatgagcctgagcagctggatgactggaaccgcattgcagagctgcagcagcgcaatcgagtgtgccccccacatctgaagacctgctatcccctggagtccaggccttccctgagcctgggcaccatcacagatgaggagatgaaaactggagacccccaagagaccctgcgccgagccagcatgcagccaatccagatagccgagggcactggcatcaccacccggcagcagcgcaaacgggtctccctagagccccaccagggccctggaactcctgagtctaagaaggccaccagctgtttcccacgccccatgactccccgagaccgacatgaagggcgcaaacagagcactactgaggcccagaagaaagcagctccagcttctactaaacaggctgaccggcgccagtcgatggccttcagcatcctcaacacacccaagaagctagggaacagccttctgcggcggggagcctcaaagaaggccctgtccaaggcttcccccaacactcgcagtggaacccgccgttctccgcgcattgccaccaccacagccagtgccgccactgctgccgccattggtgccacccctcgagccaagggcaaggcaaagcactaaagggccagtaccagtgagtggccccacctgtgtccccgatgctgccgtcacctggtcctccgcctactgtccctctcagtgccttctctcagctcccaggccaacagtagccaaacccctagagacagtgatgcctgcccgcaccctggcctggcccctggtccttcactggcgccttctcggagctggcccagggggcctggagcatggacagtgtgggcgctctccctaccttgcctccttttttcttaaagcaaagtcacttctccatcacaaccagatttgaggctggttttgatggctgggtccttgggcctggccagtcttcctcttagcctctggatctagaagggaccataagaggagtaggccctggttcctgctgtcctggtggctgggccagcaggggccctcactcttgaagtccaggactgggtctgacctggtgggagcacctgccagaggatgctctttcccaggacggatgggccctgtgtctcaggagtggggttgggggacagccttcagcagcagctcacaccctaccttccccagacttgcactggggtgggatttggagtgatgggaaggtttttaagggccggggatggatcttttctaaatgttattacttgtaaataaagtctattttt

SEQ ID NO: 15 - DNA, 1471 bp, Homo sapiens
gactctccagtcctcagtcaccttggacaaagaagtgtggatcctcagattccatcttttccaactccaaggtgccatggcagagaaggtgctggtaacaggtggggctggctacattggcagccacacggtgctggagctgctggaggctggctacttgcctgtggtcatcgataacttccataatgccttccgtggagggggctccctgcctgagagcctgcggcgggtccaggagctgacaggccgctctgtggagtttgaggagatggacattttggaccagggagccctacagcgtctcttcaaaaagtacagctttatggcggtcatccactttgcggggctcaaggccgtgggcgagtcggtgcagaagcctctggattattacagagttaacctgaccgggaccatccagcttctggagatcatgaaggcccacggggtgaagaacctggtgttcagcagctcagccactgtgtacgggaacccccagtacctgccccttgatgaggcccaccccacgggtggttgtaccaacccttacggcaagtccaagttcttcatcgaggaaatgatccgggacctgtgccaggcagacaagacttggaacgtagtgctgctgcgctatttcaaccccacaggtgcccatgcctctggctgcattggtgaggatccccagggcatacccaacaacctcatgccttatgtctcccaggtggcgatcgggcgacgggaggccctgaatgtctttggcaatgactatgacacagaggatggcacaggtgtccgggattacatccatgtcgtggatctggccaagggccacattgcagccttaaggaagctgaaagaacagtgtggctgccggatctacaacctgggcacgggcacaggctattcagtgctgcagatggtccaggctatggagaaggcctctgggaagaagatcccgtacaaggtggtggcacggcgggaaggtgatgtggcagcctgttacgccaaccccagcctggcccaagaggagctggggtggacagcagccttagggctggacaggatgtgtgaggatctctggcgctggcagaagcagaatccttcaggctttggcacgcaagcctgaggaccctcccctaccaaggaccaggaaaagcagcagctgcctgctctccagcctctggaggaactcagggccctggagctgctggggccaagccaagggcctcccctacctcaaaccccagctgggcccgcttagcccaccaggcatgaggccaaggctccactgaccaggaggccgaggtctctaactcttatcttccacagggtccaagagttcatcaggacccccaagagtgagtgagggggcaaggctctggcacaaaacctcctcctcccaggcactcatttatattgctctgaaagagctttccaaagtatttaaaaataaaaacaagttttcttacactgg

SEQ ID NO: 16 - DNA, 4122 bp, Homo sapiens
acattgtagcaaaatggcgactgtcattcacaaccccctgaaagcgctcggggaccagttctacaaggaagccattgagcactgccggagttacaactcacggctgagtgcagagcgcagcgtgcgtcttcccttcctggactcacagactggggtggcccagaacaactgctacatctggatggagaagaggcaccgaggcccaggccttgccccgggccagctgtatacataccctgcccgctgctggcgcaagaagagacgattgcacccacctgaagatccaaaactgcggctgctggagataaaacctgaagtggagcttcccctgaagaaggatgggttcacctcagagagcaccacgctggaagccttgctccgtggcgagggggttgagaagaaggtggatgccagggaggaggaaagcatccaggaaatacagagggttttggaaaatgatgaaaatgtagaagaagggaatgaagaagaggatttggaagaggatattcccaagcgaaaggacaggactagaggacgggctcgctgccctctcccttccctgcactgtttttcctcccttccctctgccgtgatagatgctaaggagtggggtggaggtgggaagtgggaagcaacagtggcgtataggaaaaagaaaatataccccgtgcacattttcaacatgtagttgaagaagcctaaattaggtactagaaaaaaaaaaaggacagaaacactgcctgatatgtgagcaagagcatgaaaatatagaatgattatctcagagcagaggaggtggggagcaggtggctggagagaggcggggtaggtaggcagggcgtccctggctcaccaatgcgtctggtccacatggcatttgggaaagcagatgggtcatgcttttgcaatgaatggtcagatgcttagggggcatttgtgctcctctggccaggaaagggaacagagtccatccaagctgccccccactcatctgccatggttgtccaccctgggggtttttcctctgaaggaaaatgaacccatcttttgcctgccatgaatcattgcagggcaggctgttactggctaaattaaaacccttggcagggcatcgactgtgtgcgaggcaatgctctaggtcctgtaggggctggaaaataaaccgcatgctggcctagccttcaagttgcttttcagccatgaaactaagctctgccaagcaatcgtgattgtaggtcaagtatcgcgccatcacggaaggtgtaagtatatgtaggtttctctgttgaggatgcgtgttcctcagtagaagacaagcaggtggaggcatccagtgatttctaccctgtggaggctgaggggtcgggggaagaaaacagatgacctcagcctagttgctttaatctgcttttccaagcactggatgcccttggatgacagcatcctcagcattaaaactggtgaactgatgaagtcacctggcctggagtgtgttgggcagccagtgtccccagagctgcttgtgggtttctggggtggaaggcagggaggtgcaactggcagggcctgatcagaggcagaaaatgacccccacagtggtcttttccctgctagagaaagcagagagcgggactgggggggtgggggcttcaagtacagattgggcacactccaccagaccccagcaaggtcagctgccccacgcctgtatctggcactgctggtgtgtgcagggatgaaacccagcatcagagaggttttcagcaaaccttccatgctcacctttggccaggtgcttgtcagatcctagcttcgtgctggcttagactctcagttgtttgtgttgacagcattaggaataaaccgtttgtttcatctttccttttctccacacgtgtcacagccagatttcagctttgagttattccctgaagaagccacaccaaccttgctttcaagcaaaatgcctgggcttgggggaaggtgtgtatctgtccatgtgtggatgtcggctcagagctatagcttctctgtggggggtggcccaagggaaggctcctctggggccctggatggcacatgactcccagtgaggagaattcaggtgatctctgtggaggtagtcagggacacaaggcttggctgtgagtctggttttaaagtgcgtgacagcctgaaaagcatgcaggggtttggtccactcacctacttgaaagcctgtgggcaacgttcttttgagccaagacttctctgaatggccctgctggtggaaggggtgaggcaaaggcctctgacttggaccctttccacaccagactggcagcacttcccccaggcagccagtggtgggccctgagccctcaggtccccagctccttgagggatgaacctgggagcccaagagccagtggctgagctctgagaaggctccatctcccacctgcccttgagcgcgctctcaggctgagaacacggtctcatcaggcgccttcctggcctgatgctgtgctgtctacgtcacacggtcgattcacaaaagccagaactagacctcaaccaggtcatctccccgttgccaagtgggttcagggtgagggcaatttgtaagctcaatttctctgacagccaagacatggagcatctctgctaagaagccaaaagaaattggttttcttcttctcattgctgaagcccctctgtgtctcttctcagggacaggctggtccagtggctttggtgagggcgcctccatttgtgaacgctgggattcctctgggtgggctttggcaggtggctcctatggtaggaaggatgaccaggtccctgggaatgagctgcctacctgctgctccacgaggaagctcaggcctgcacaggctccaccaggccttggatgccctctagttgagtcagagaccctggaaacacactgagatctccaattgctgcctccattgatgtctctagacctgcagatacgaagcaaacctgggattgcttcttccaggtatgggcaccagagagggaggccactgcaacattttatccccatcattccaaaatgcttgcttgtctcttttacctcacactcacaactccttctgagactctcagtcataaaggaatgaccaagagagtgggtctccagtgagagaaatgcctatgaaagagggtttccctttttgctcttttgaacaccctccccactgatccttgggacccaacgccgcattgcctcttgcagatgaggttttgccttgggctgcttgggtacttcagaccaggactgagtctgacacagctttcatgaggttacagaaaagggctacagatttgggaagctgtgtgtaatggtcttgagacaatatctccatttggcccaccctggcttctctaaaaagcaacgacagcaacagacaaacaaaaagctcccacctcccaccccgttagctgtcctcctccttcactgtgatgtggttgcggtctctgtaggtgtgtgtgccacccttgtcctctgtcctctggggatgtgcccttcccacgtgtgtcaggttcccactctttcgtggttcctaacgtgaagtgctgtgatgtttctgccctgcctaaggaacgtatcaagctctctcagtgtttcagtgttggagattgaggctgtgccacatcttctgccatcctaaggggacatgatggttctgtgattcccagagagctggcagattgtgacaatctccaggagaacctacagattggaagcagcccacacctgatgtggactcctgtcccgggactcactcttcattcagaagactggtggcccacgtgccaggaccaccccacctctcttgctgccttttctcctgtcctgatggggttctgggagggagacctgtcgctgatgagatgaagaatgtggggatcgagcagccttcttctttgggacccctcgatatcccatggaatgctcgcacgttctcaaagactgagtcacaagcccctaccccttccttgctgtggttagtatcttgttctgtgattggttagcaatgttgactacccacgtagtgaatcttttgtctgcaatttagagaatgtgtaaacaaataaaaggctttaaaactc

SEQ ID NO: 17 - DNA, 497 bp, Homo sapiens
agtgcaatgagcttcatgctgaatactgatttgaagtgtggttcaccacacagacttaaattgtccttcccacaactttatctgagaagcatgacaacggtgacaatcacaggactagttttattggtcaggatgtggtgttactatattaaagcgcttcaagttttcatagcgctcgtcaaacagagacctcggaacgctctgcagacattaattaatgttcgctccggccctggaagccatttcaccaatggaaattccgatgagaaaggaagaaacgaggggttcaaggccgcgccgttgtgagtccgctgcggaactaggaactgaaaccccgtggttcccaatgagccagcgaaagtctgtcgaagtattgagcacccctattgaagactgtgggagttttggcggcttaatgggattgtgttcggtccttcaggctctcctttaaaagattccatggcaccaacgagactccaataaaagggcctctctaa

SEQ ID NO: 18 - protein, 532 aa, Homo sapiens
MAPSSPRPALPALLVLLGALFPGPGNAQTSVSPSKVILPRGGSVLVTCSTSCDQPKLLGIETPLPKKELLLPGNNRKVYELSNVQEDSQPMCYSNCPDGQSTAKTFLTVYWTPERVELAPLPSWQPVGKNLTLRCQVEGGAPRANLTVVLLRGEKELKREPAVGEPAEVTTTVLVRRDHHGANFSCRTELDLRPQGLELFENTSAPYQLQTFVLPATPPQLVSPRVLEVDTQGTVVCSLDGLFPVSEAQVHLALGDQRLNPTVTYGNDSFSAKASVSVTAEDEGTQRLTCAVILGNQSQETLQTVTIYSFPAPNVILTKPEVSEGTEVTVKCEAHPRAKVTLNGVPAQPLGPRAQLLLKATPEDNGRSFSCSATLEVAGQLIHKNQTRELRVLYGPRLDERDCPGNWTWPENSQQTPMCQAWGNPLPELKCLKDGTFPLPIGESVTVTRDLEGTYLCRARSTQGEVTREVTVNVLSPRYEIVIITVVAAAVIMGTAGLSTYLYNRQRKIKKYRLQQAQKGTPMKPNTQATPP

SEQ ID NO: 19 - protein, 271 aa, Homo sapiens
MGSLFPLSLLFFLAAAYPGVGSALGRRTKRAQSPKGSPLAPSGTSVPFWVRMSPEFVAVQPGKSVQLNCSNSCPQPQNSSLRTPLRQGKTLRGPGWVSYQLLDVRAWSSLAHCLVTCAGKTRWATSRITAYKPPHSVILEPPVLKGRKYTLRCHVTQVFPVGYLVVTLRHGSRVIYSESLERFTGLDLANVTLTYEFAAGPRDFWQPVICHARLNLDGLVVRNSSAPITLMLAWSPAPTALASGSIAALVGILLTVGAAYLCKCLAMKSQA

SEQ ID NO: 20 - protein, 924 aa, Homo sapiens
MPGPSPGLRRALLGLWAALGLGLFGLSAVSQEPFWADLQPRVAFVERGGSLWLNCSTNCPRPERGGLETSLRRNGTQRGLRWLARQLVDIREPETQPVCFFRCARRTLQARGLIRTFQRPDRVELMPLPPWQPVGENFTLSCRVPGAGPRASLTLTLLRGAQELIRRSFAGEPPRARGAVLTATVLARREDHGANFSCRAELDLRPHGLGLFENSSAPRELRTFSLSPDAPRLAAPRLLEVGSERPVSCTLDGLFPASEARVYLALGDQNLSPDVTLEGDAFVATATATASAEQEGARQLICNVTLGGENRETRENVTIYSFPAPLLTLSEPSVSEGQMVTVTCAAGTQALVTLEGVPAAVPGQPAQLQLNATENDDRRSFFCDATLDVDGETLIKNRSAELRVLYAPRLDDSDCPRSWTWPEGPEQTLRCEARGNPEPSVHCARSDGGAVLALGLLGPVTRALSGTYRCKAANDQGEAVKDVTLTVEYAPALDSVGCPERITWLEGTEASLSCVAHGVPPPDVICVRSGELGAVIEGLLRVAREHAGTYRCEATNPRGSAAKNVAVTVEYGPRFEEPSCPSNWTWVEGSGRLFSCEVDGKPQPSVKCVGSGGATEGVLLPLAPPDPSPRAPRIPRVLAPGIYVCNATNRHGSVAKTVVVSAESPPEMDESTCPSHQTWLEGAEASALACAARGRPSPGVRCSREGIPWPEQQRVSREDAGTYHCVATNAHGTDSRTVTVGVEYRPVVAELAASPPGGVRPGGNFTLTCRAEAWPPAQISWRAPPGALNIGLSSNNSTLSVAGAMGSHGGEYECARTNAHGRHARRITVRVAGPWLWVAVGGAAGGAALLAAGAGLAFYVQSTACKKGEYNVQEAESSGEAVCLNGAGGGAGGAAGAEGGPEAAGGAAESPAEGEVFAIQLTSA

SEQ ID NO: 21 - protein, 422 aa, Homo sapiens
MSLHFLYYCSEPTLDVKIAFCQGFDKQVDVSYIAKHYNMSKSKVDNQFYSVEVGDSTFTVLKRYQNLKPIGSGAQGIVCAAYDAVLDRNVAIKKLSRPFQNQTHAKRAYRELVLMKCVNHKNIISLLNVFTPQKTLEEFQDVYLVMELMDANLCQVIQMELDHERMSYLLYQMLCGIKHLHSAGIIHRDLKPSNIVVKSDCTLKILDFGLARTAGTSFMMTPYVVTRYYRAPEVILGMGYKENVDIWSVGCIMGEMVRHKILFPGRDYIDQWNKVIEQLGTPCPEFMKKLQPTVRNYVENRPKYAGLTFPKLFPDSLFPADSEHNKLKASQARDLLSKMLVIDPAKRISVDDALQHPYINVWYDPAEVEAPPPQIYDKQLDEREHTIEEWKELIYKEVMNSEEKTKNGVVKGQPSPSAQVQQ

SEQ ID NO: 22 - protein, 1031 aa, Homo sapiens [sequence omitted]

SEQ ID NO: 23 - protein, 2101 aa, Homo sapiens
MTLHATRGAALLSWVNSLHVADPVEAVLQLQDCSIFIKIIDRIHGTEEGQQILKQPVSERLDFVCSFLQKNRKHPSSPECLVSAQKVLEGSELELAKMTMLLLYHSTMSSKSPRDWEQFEYKIQAELAVILKFVLDHEDGLNLNEDLENFLQKAPVPSTCSSTFPEELSPPSHQAKREIRFLELQKVASSSSGNNFLSGSPASPMGDILQTPQFQMRRLKKQLADERSNRDELELELAENRKLLTEKDAQIAMMQQRIDRLALLNEKQAASPLEPKELEELRDKNESLTMRLHETLKQCQDLKTEKSQMDRKINQLSEENGDLSFKLREFASHLQQLQDALNELTEEHSKATQEWLEKQAQLEKELSAALQDKKCLEEKNEILQGKLSQLEEHLSQLQDNPPQEKGEVLGDVLQLETLKQEAATLAANNTQLQARVEMLETERGQQEAKLLAERGHFEEEKQQLSSLITDLQSSISNLSQAKEELEQASQAHGARLTAQVASLTSELTTLNATIQQQDQELAGLKQQAKEKQAQLAQTLQQQEQASQGLRHQVEQLSSSLKQKEQQLKEVAEKQEATRQDHAQQLATAAEEREASLRERDAALKQLEALEKEKAAKLEILQQQLQVANEARDSAQTSVTQAQREKAELSRKVEELQACVETARQEQHEAQAQVAELELQLRSEQQKATEKERVAQEKDQLQEQLQALKESLKVTKGSLEEEKRRAADALEEQQRCISELKAETRSLVEQHKRERKELEEERAGRKGLEARLLQLGEAHQAETEVLRRELAEAMAAQHTAESECEQLVKEVAAWRDGYEDSQQEEAQYGAMFQEQLMTLKEECEKARQELQEAKEKVAGIESHSELQISRQQNKLAELHANLARALQQVQEKEVRAQKLADDLSTLQEKMAATSKEVARLETLVRKAGEQQETASRELVKEPARAGDRQPEWLEEQQGRQFCSTQAALQAMEREAEQMGNELERLRAALMESQGQQQEERGQQEREVARLTQERGRAQADLALEKAARAELEMRLQNALNEQRVEFATLQEALAHALTEKEGKDQELAKLRGLEAAQIKELEELRQTVKQLKEQLAKKEKEHASGSGAQSEAAGRTEPTGPKLEALRAEVSKLEQQCQKQQEQADSLERSLEAERASRAERDSALETLQGQLEEKAQELGHSQSALASAQRELAAFRTKVQDHSKAEDEWKAQVARGRQEAERKNSLISSLEEEVSILNRQVLEKEGESKELKRLVMAESEKSQKLEESCACCRQRQPATVPELQNAALLCGRRCRASGREAEKQRVASENLRQELTSQAERAEELGQELKAWQEKFFQKEQALSTLQLEHTSTQALVSELLPAKHLCQQLQAEQAAAEKRHREELEQSKQAAGGLRAELLRAQRELGELIPLRQKVAEQERTAQQLRAEKASYAEQLSMLKKAHGLLAEENRGLGERANLGRQFLEVELDQAREKYVQELAAVRADAETRLAEVQREAQSTARELEVMTAKYEGAKVKVLEERQRFQEERQKLTAQVEELSKKLADSDQASKVQQQKLKAVQAQGGESQQEAQRFQAQLNELQAQLSQKEQAAEHYKLQMEKAKTHYDAKKQQNQELQEQLRSLEQLQKENKELRAEAERLGHELQQAGLKTKEAEQTCRHLTAQVRSLEAQVAHADQQLRDLGKFQVATDALKSREPQAKPQLDLSIDSLDLSCEEGTPLSITSKLPRTQPDGTSVPGEPASPISQRLPPKVESLESLYFTPIPARSQAPLESSLDSLGDVFLDSGRKTRSARRRTTQIINITMTKKLDVEEPDSANSSFYSTRSAPASQASLRATSSTQSLARLGSPDYGNSALLSLPGYRPTTRSSARRSQAGVSSGAPPGRNSFYMGTCQDEPEQLDDWNRIAELQQRNRVCPPHLKTCYPLESRPSLSLGTITDEEMKTGDPQETLRRASMQPIQIAEGTGITTRQQRKRVSLEPHQGPGTPESKKATSCFPRPMTPRDRHEGRKQSTTEAQKKAAPASTKQADRRQSMAFSILNTPKKLGNSLLRRGASKKALSKASPNTRSGTRRSPRIATTTASAATAAAIGATPRAKGKAKH

SEQ ID NO: 24 - protein, 348 aa, Homo sapiens
MAEKVLVTGGAGYIGSHTVLELLEAGYLPVVIDNFHNAFRGGGSLPESLRRVQELTGRSVEFEEMDILDQGALQRLFKKYSFMAVIHFAGLKAVGESVQKPLDYYRVNLTGTIQLLEIMKAHGVKNLVFSSSATVYGNPQYLPLDEAHPTGGCTNPYGKSKFFIEEMIRDLCQADKTWNVVLLRYFNPTGAHASGCIGEDPQGIPNNLMPYVSQVAIGRREALNVFGNDYDTEDGTGVRDYIHVVDLAKGHIAALRKLKEQCGCRIYNLGTGTGYSVLQMVQAMEKASGKKIPYKVVARREGDVAACYANPSLAQEELGWTAALGLDRMCEDLWRWQKQNPSGFGTQA

SEQ ID NO: 25 - protein, 224 aa, Homo sapiens
MATVIHNPLKALGDQFYKEAIEHCRSYNSRLSAERSVRLPFLDSQTGVAQNNCYIWMEKRHRGPGLAPGQLYTYPARCWRKKRRLHPPEDPKLRLLEIKPEVELPLKKDGFTSESTTLEALLRGEGVEKKVDAREEESIQEIQRVLENDENVEEGNEEEDLEEDIPKRKDRTRGRARCPLPSLHCFSSLPSAVIDAKEWGGGGKWEATVAYRKKKIYPVHIFNM

SEQ ID NO: 26 - protein, 99 aa, Homo sapiens
MSFMLNTDLKCGSPHRLKLSFPQLYLRSMTTVTITGLVLLVRMWCYYIKALQVFIALVKQRPRNALQTLINVRSGPGSHFTNGNSDEKGRNEGFKAAPL

SEQ ID NO: 27 - protein, 1114 aa, Homo sapiens
MLSCLKEEMPPQELTRRLATVITHVDEIMQQEVRPLMAVEIIEQLHRQFAILSGGRGEDGAPIITFPEFSGFKHIPDEDFLNVMTYLTSIPSVEAASIGFIVVIDRRRDKWSSVKASLTRIAVAFPGNLQLIFILRPSRFIQRTFTDIGIKYYRNEFKTKVPIIMVNSVSDLHGYIDKSQLTRELGGTLEYRHGQWVNHRTAIENFALTLKTTAQMLQTFGSCLATAELPRSMLSTEDLLMSHTRQRDKLQDELKLLGKQGTTLLSCIQEPATKCPNSKLNLNQLENVTTMERLLVQLDETEKAFSHFWSEHHLKLNQCLQLQHFEHDFCKAKLALDNLLEEQAEFTGIGDSVMHVEQILKEHKKLEEKSQEPLEKAQLLALVGDQLIQSHHYAADAIRPRCVELRHLCDDFINGNKKKWDILGKSLEFHRQLDKVSQWCEAGIYLLASQAVDKCQSREGVDIALNDIATFLGTVKEYPLLSPKEFYNEFELLLTLDAKAKAQKVLQRLDDVQEIFHKRQVSLMKLAAKQTRPVQPVAPHPESSPKWVSSKTSQPSTSVPLARPLRTSEEPYTETELNSRGKEDDETKFEVKSEEIFESHHERGNPELEQQARLGDLSPRRRIIRDLLETEEIYIKEIKSIIDGYITPMDFIWLKHLIPDVLQNNKDFLFGNIRELYEFHNRTFLKELEKCAENPELLAHCFLKRKEDLQIYFKYHKNLPRARAIWQECQDCAYFGVCQRQLDHNLPLFKYLKGPSQRLIKYQMLLKGLLDFESPEDMEIDPGELGGSAKDGPKRTKDSAFSTELQQALAVIEDLIKSCELAVDLAAVTECPDDIGKLGKLLLHGPFSVWTIHKDRYKMKDLIRFKPSQRQIYLFERGIVFCKIRMEPGDQGLSPHYSFKKTMKLMTLSIRQLGRGSHRKFEIASRNGLEKYILQAASKEIRDCWFSEISKLLMEQQNNIKDQGNPQFEMSTSKGSGAGSGPWIKNMERATTSKEDPASSTGGIKGCSSREFSSMDTFEDCEGAEDMEKESSALSLAGLFQSDDSHETCSSKSAFLERGESSQGEKEERDEEETATRSTEEERAGASTGRLAPAGATAGFQARALRPRTSAQES

SEQ ID NO: 28 - DNA, 21 bp, Artificial Sequence
  Synthetic primer
gacagccacagctagcgcaga

SEQ ID NO: 29 - DNA, 22 bp, Artificial Sequence
  Synthetic primer
tgttttcgccccccagggtgac

SEQ ID NO: 30 - DNA, 21 bp, Artificial Sequence
  Synthetic primer
ctgattattctgatggtaatg

SEQ ID NO: 31 - DNA, 21 bp, Artificial Sequence
  Synthetic primer
gcccatgttaacattttcttc

SEQ ID NO: 32 - DNA, 20 bp, Artificial Sequence
  Synthetic primer
atgtcaagtgcacccacatg

SEQ ID NO: 33 - DNA, 20 bp, Artificial Sequence
  Synthetic primer
aggaagaaactgacggaagg

SEQ ID NO: 34 - DNA, 20 bp, Artificial Sequence
  Synthetic primer
taatacaaaggtggcagcag

SEQ ID NO: 35 - DNA, 20 bp, Artificial Sequence
  Synthetic primer
ttgacaaggataaggacaag

SEQ ID NO: 36 - DNA, 21 bp, Artificial Sequence
  Synthetic primer
gcacatggccacattaactgg

SEQ ID NO: 37 - DNA, 22 bp, Artificial Sequence
  Synthetic primer
tggctgtggaaattgggtcttg

SEQ ID NO: 38 - DNA, 20 bp, Artificial Sequence
  Synthetic primer
ccagggtgtgttctaatacg

SEQ ID NO: 39 - DNA, 20 bp, Artificial Sequence
  Synthetic primer
aagtcactaaccccacacac

SEQ ID NO: 40 - DNA, 20 bp, Artificial Sequence
  Synthetic primer
gacttttaggtctgagttgg

SEQ ID NO: 41 - DNA, 21 bp, Artificial Sequence
  Synthetic primer
cttcctctagcagtgtatttc

SEQ ID NO: 42 - DNA, 19 bp, Artificial Sequence
  Synthetic primer
cccagggtgacgttgcaga

SEQ ID NO: 43 - DNA, 24 bp, Artificial Sequence
  Synthetic primer
attattctgatggtaatgatccag

SEQ ID NO: 44 - DNA, 19 bp, Artificial Sequence
  Synthetic primer
cacatgcctgctcgccccc

SEQ ID NO: 45 - DNA, 18 bp, Artificial Sequence
  Synthetic primer
aaggggaggtcgactggg

SEQ ID NO: 46 - DNA, 18 bp, Artificial Sequence
  Synthetic primer
ggcatctggcagtcatgg

SEQ ID NO: 47 - DNA, 20 bp, Artificial Sequence
  Synthetic primer
cgtcagcaaatgtgtaccga

SEQ ID NO: 48 - DNA, 21 bp, Artificial Sequence
  Synthetic primer
ttggtccattagggaattaga

SEQ ID NO: 49 - DNA, 30 bp, Artificial Sequence
  Synthetic primer
acgttggatgtgtggcaaatgatggaacag

SEQ ID NO: 50 - DNA, 30 bp, Artificial Sequence
  Synthetic primer
acgttggatgccagaagtttgagatctgcc

SEQ ID NO: 51 - DNA, 30 bp, Artificial Sequence
  Synthetic primer
acgttggatgtcgcgtgcgtgacgtcatcc

SEQ ID NO: 52 - DNA, 29 bp, Artificial Sequence
  Synthetic primer
acgttggatgcgggaggtcaaggccactg

SEQ ID NO: 53 - DNA, 30 bp, Artificial Sequence
  Synthetic primer
acgttggatgtcacatcaacagtggtacgg

SEQ ID NO: 54 - DNA, 30 bp, Artificial Sequence
  Synthetic primer
acgttggatgagcctgccctacagcgactt

SEQ ID NO: 55 - DNA, 30 bp, Artificial Sequence
  Synthetic primer
acgttggatgtcggcctggctcagaagagg

SEQ ID NO: 56 - DNA, 31 bp, Artificial Sequence
  Synthetic primer
acgttggatgacccctaccccacgctaccca

SEQ ID NO: 57 - DNA, 30 bp, Artificial Sequence
  Synthetic primer
acgttggatgccaccccgtaccactgttga

SEQ ID NO: 58 - DNA, 30 bp, Artificial Sequence
  Synthetic primer
acgttggatgtgaggctcccaagtcggcca

SEQ ID NO: 59 - DNA, 30 bp, Artificial Sequence
  Synthetic primer
acgttggatgaggtgacaccttcctcgaag

SEQ ID NO: 60 - DNA, 30 bp, Artificial Sequence
  Synthetic primer
acgttggatgtgtgaagcacctcttctgag

SEQ ID NO: 61 - DNA, 30 bp, Artificial Sequence
  Synthetic primer
acgttggatgggaatggatgcagaagcccg

SEQ ID NO: 62 - DNA, 29 bp, Artificial Sequence
  Synthetic primer
acgttggatgaagctgaggccacagggag

SEQ ID NO: 63 - DNA, 30 bp, Artificial Sequence
  Synthetic primer
acgttggatgaaaaacaaaaagagggaatg

SEQ ID NO: 64 - DNA, 29 bp, Artificial Sequence
  Synthetic primer
acgttggatgggccatcgccattgggaag

SEQ ID NO: 65 - DNA, 30 bp, Artificial Sequence
  Synthetic primer
acgttggatgttgaactcctgggctcaagt

SEQ ID NO: 66 - DNA, 30 bp, Artificial Sequence
  Synthetic primer
acgttggatgagacaaaaatccacctgggc

SEQ ID NO: 67 - DNA, 30 bp, Artificial Sequence
  Synthetic primer
acgttggatgtcaagtgatcctcccatctc

SEQ ID NO: 68 - DNA, 30 bp, Artificial Sequence
  Synthetic primer
acgttggatgggacacaggaatgaacagag

SEQ ID NO: 69 - DNA, 30 bp, Artificial Sequence
  Synthetic primer
acgttggatgaagaacggcaccattgtggc

SEQ ID NO: 70 - DNA, 30 bp, Artificial Sequence
  Synthetic primer
acgttggatgttccactgagctcttgcccc

SEQ ID NO: 71 - DNA, 29 bp, Artificial Sequence
  Synthetic primer
acgttggatgtcggagatctccatggcga

SEQ ID NO: 72 - DNA, 30 bp, Artificial Sequence
  Synthetic primer
acgttggatgaccacgtcgaggctgggtac

SEQ ID NO: 73 - DNA, 29 bp, Artificial Sequence
  Synthetic primer
acgttggatggtttccccgcggagcctgg

SEQ ID NO: 74 - DNA, 29 bp, Artificial Sequence
  Synthetic primer
acgttggatgtccctacgcgccgagcccc

SEQ ID NO: 75 - DNA, 30 bp, Artificial Sequence
  Synthetic primer
acgttggatgaaaaggaaggaagctgcgtg

SEQ ID NO: 76 - DNA, 30 bp, Artificial Sequence
  Synthetic primer
acgttggatgaagctagctgcctcagtttc

SEQ ID NO: 77 - DNA, 30 bp, Artificial Sequence
  Synthetic primer
acgttggatgcctctgctactcagagttgc

SEQ ID NO: 78 - DNA, 29 bp, Artificial Sequence
  Synthetic primer
acgttggatgactcacctgggaacagagc

SEQ ID NO: 79 - DNA, 30 bp, Artificial Sequence
  Synthetic primer
acgttggatgtagccttacctcctgcctca

SEQ ID NO: 80 - DNA, 30 bp, Artificial Sequence
  Synthetic primer
acgttggatgacgcaatctagccaagcaag

SEQ ID NO: 81 - DNA, 30 bp, Artificial Sequence
  Synthetic primer
acgttggatgatgagaggtgtgaaccaccg

SEQ ID NO: 82 - DNA, 30 bp, Artificial Sequence
  Synthetic primer
acgttggatgtggccgctataacgtttccc

SEQ ID NO: 83 - DNA, 30 bp, Artificial Sequence
  Synthetic primer
acgttggatgttatccgtggcccaaagctg

SEQ ID NO: 84 - DNA, 30 bp, Artificial Sequence
  Synthetic primer
acgttggatgaaagaccctctgaccccttc

SEQ ID NO: 85 - DNA, 30 bp, Artificial Sequence
  Synthetic primer
acgttggatgtgtaagtttggggaaccagg

SEQ ID NO: 86 - DNA, 30 bp, Artificial Sequence
  Synthetic primer
acgttggatgctggatctcaggctttgttg

SEQ ID NO: 87 - DNA, 30 bp, Artificial Sequence
  Synthetic primer
acgttggatgggagacatagcgagattctg

SEQ ID NO: 88 - DNA, 30 bp, Artificial Sequence
  Synthetic primer
acgttggatgtagaaagcagtgcgatctgg

SEQ ID NO: 89 - DNA, 30 bp, Artificial Sequence
  Synthetic primer
acgttggatgatctttgagtgaggcagtgc

SEQ ID NO: 90 - DNA, 30 bp, Artificial Sequence
  Synthetic primer
acgttggatgaggggcttatttggatcagg

SEQ ID NO: 91 - DNA, 30 bp, Artificial Sequence
  Synthetic primer
acgttggatggaatctgagggacctgatcc

SEQ ID NO: 92 - DNA, 30 bp, Artificial Sequence
  Synthetic primer
acgttggatgttgcagtgagccgagatcac

SEQ ID NO: 93 - DNA, 30 bp, Artificial Sequence
  Synthetic primer
acgttggatgtttttgagacggagtctcac

SEQ ID NO: 94 - DNA, 30 bp, Artificial Sequence
  Synthetic primer
acgttggatgaggagaatcgtttgaacctg

SEQ ID NO: 95 - DNA, 30 bp, Artificial Sequence
  Synthetic primer
acgttggatgtgtagtcccagctactcagg

SEQ ID NO: 96 - DNA, 30 bp, Artificial Sequence
  Synthetic primer
acgttggatgtgatctcggctcactgcaac

SEQ ID NO: 97 - DNA, 30 bp, Artificial Sequence
  Synthetic primer
acgttggatgaagaagtcaggtggagacag

SEQ ID NO: 98 - DNA, 30 bp, Artificial Sequence
  Synthetic primer
acgttggatgaaattgaggcccaaagaggg

SEQ ID NO: 99 - DNA, 30 bp, Artificial Sequence
  Synthetic primer
acgttggatgaatctcagctcactgcaacc

SEQ ID NO: 100 - DNA, 30 bp, Artificial Sequence
  Synthetic primer
acgttggatggcctgtaatcccagatactc

SEQ ID NO: 101 - DNA, 30 bp, Artificial Sequence
  Synthetic primer
acgttggatgggagaatcacttgaacccgg

SEQ ID NO: 102 - DNA, 30 bp, Artificial Sequence
  Synthetic primer
acgttggatgagtctcgctttgtcactcag

SEQ ID NO: 103 - DNA, 30 bp, Artificial Sequence
  Synthetic primer
acgttggatgtctcgctttgtcactcagac

SEQ ID NO: 104 - DNA, 30 bp, Artificial Sequence
  Synthetic primer
acgttggatgaatcacttgaacccgggagg

SEQ ID NO: 105 - DNA, 30 bp, Artificial Sequence
  Synthetic primer
acgttggatgcactgaaggccatgctaaag

SEQ ID NO: 106 - DNA, 30 bp, Artificial Sequence
  Synthetic primer
acgttggatgactccagtctgagtgacaaa

SEQ ID NO: 107 - DNA, 30 bp, Artificial Sequence
  Synthetic primer
acgttggatgtgccaggtcctagaagaaac

SEQ ID NO: 108 - DNA, 30 bp, Artificial Sequence
  Synthetic primer
acgttggatgcgcacattcccttgatgaac

SEQ ID NO: 109 - DNA, 30 bp, Artificial Sequence
  Synthetic primer
acgttggatgtgacatgcagcacctcctgt

SEQ ID NO: 110 - DNA, 30 bp, Artificial Sequence
  Synthetic primer
acgttggatgggagcaactcctttttaggc

SEQ ID NO: 111 - DNA, 31 bp, Artificial Sequence
  Synthetic primer
acgttggatgtacgagcaagtggcaaagatt

SEQ ID NO: 112 - DNA, 30 bp, Artificial Sequence
  Synthetic primer
acgttggatgtgagtaactgagcccggagg

SEQ ID NO: 113 - DNA, 30 bp, Artificial Sequence
  Synthetic primer
acgttggatgtactgtgagtaactgagccc

SEQ ID NO: 114 - DNA, 30 bp, Artificial Sequence
  Synthetic primer
acgttggatgagcaagtggcaaagattccc

SEQ ID NO: 115 - DNA, 30 bp, Artificial Sequence
  Synthetic primer
acgttggatgatctcctgaccttgtgatcc

SEQ ID NO: 116 - DNA, 30 bp, Artificial Sequence
  Synthetic primer
acgttggatggccctgggatggcatttttc

SEQ ID NO: 117 - DNA, 31 bp, Artificial Sequence
  Synthetic primer
acgttggatgtggtcaggctggtctcgaact

SEQ ID NO: 118 - DNA, 30 bp, Artificial Sequence
  Synthetic primer
acgttggatgaaatgtcatgggctgggcac

SEQ ID NO: 119 - DNA, 30 bp, Artificial Sequence
  Synthetic primer
acgttggatgctctcttctcatagccagct

SEQ ID NO: 120 - DNA, 30 bp, Artificial Sequence
  Synthetic primer
acgttggatgattagggaagggcagtttcg

SEQ ID NO: 121 - DNA, 30 bp, Artificial Sequence
  Synthetic primer
acgttggatgggccggagaatcacttaaac

SEQ ID NO: 122 - DNA, 30 bp, Artificial Sequence
  Synthetic primer
acgttggatgagagtttcactcttgttgcc

SEQ ID NO: 123 - DNA, 30 bp, Artificial Sequence
  Synthetic primer
acgttggatgagtagctggaattacaggcg

SEQ ID NO: 124 - DNA, 30 bp, Artificial Sequence
  Synthetic primer
acgttggatggccaacatgatgaaatcccg

SEQ ID NO: 125 - DNA, 30 bp, Artificial Sequence
  Synthetic primer
acgttggatgcacaaggtcaggagatcaag

SEQ ID NO: 126 - DNA, 30 bp, Artificial Sequence
  Synthetic primer
acgttggatgccacgcctggctaatttttg

SEQ ID NO: 127 - DNA, 30 bp, Artificial Sequence
  Synthetic primer
acgttggatgccaaagtgctgggattacag

SEQ ID NO: 128 - DNA, 30 bp, Artificial Sequence
  Synthetic primer
acgttggatgaagtccccaaagtaggaagg

SEQ ID NO: 129 - DNA, 30 bp, Artificial Sequence
  Synthetic primer
acgttggatgttcgaagtccccaaagtagg

SEQ ID NO: 130 - DNA, 30 bp, Artificial Sequence
  Synthetic primer
acgttggatgaaagtgctgggattacaggc

SEQ ID NO: 131 - DNA, 30 bp, Artificial Sequence
  Synthetic primer
acgttggatgtagtcccagctactcaggag

SEQ ID NO: 132 - DNA, 30 bp, Artificial Sequence
  Synthetic primer
acgttggatgtgtcatcacggctcactaca

SEQ ID NO: 133 - DNA, 30 bp, Artificial Sequence
  Synthetic primer
acgttggatgtgtagtgagccgtgatgaca

SEQ ID NO: 134 - DNA, 30 bp, Artificial Sequence
  Synthetic primer
acgttggatgtcccaaagctacttggccag

SEQ ID NO: 135 - DNA, 30 bp, Artificial Sequence
  Synthetic primer
acgttggatgtgagcagatgctgaccttcc

SEQ ID NO: 136 - DNA, 30 bp, Artificial Sequence
  Synthetic primer
acgttggatgaagaccttcaaagaggtttc

SEQ ID NO: 137 - DNA, 30 bp, Artificial Sequence
  Synthetic primer
acgttggatgcgacagagcaagactgtgtg

SEQ ID NO: 138 - DNA, 30 bp, Artificial Sequence
  Synthetic primer
acgttggatgcttttctgcatctctgcctg

SEQ ID NO: 139 - DNA, 30 bp, Artificial Sequence
  Synthetic primer
acgttggatgtatgctctcagctatcaggc

SEQ ID NO: 140 - DNA, 30 bp, Artificial Sequence
  Synthetic primer
acgttggatgactctagacctctggtgatc

SEQ ID NO: 141 - DNA, 30 bp, Artificial Sequence
  Synthetic primer
acgttggatgccacagtcatagagggagaa

SEQ ID NO: 142 - DNA, 30 bp, Artificial Sequence
  Synthetic primer
acgttggatgcctgatagctgagagcatag

SEQ ID NO: 143 - DNA, 30 bp, Artificial Sequence
  Synthetic primer
acgttggatgattacaggtgtgagccactg

SEQ ID NO: 144 - DNA, 30 bp, Artificial Sequence
  Synthetic primer
acgttggatggcagggagaaatcttgatgg

SEQ ID NO: 145 - DNA, 30 bp, Artificial Sequence
  Synthetic primer
acgttggatgactgggattacaggtgtgag

SEQ ID NO: 146 - DNA, 30 bp, Artificial Sequence
  Synthetic primer
acgttggatgggagaaatcttgatggaggc

SEQ ID NO: 147 - DNA, 30 bp, Artificial Sequence
  Synthetic primer
acgttggatgaactactctggaggctcaag

SEQ ID NO: 148 - DNA, 30 bp, Artificial Sequence
  Synthetic primer
acgttggatgcagagtgagactccatctca

SEQ ID NO: 149 - DNA, 30 bp, Artificial Sequence
  Synthetic primer
acgttggatgcccttcctcccatcaatcaa

SEQ ID NO: 150 - DNA, 30 bp, Artificial Sequence
  Synthetic primer
acgttggatgattgcaccactgcattccag

SEQ ID NO: 151 - DNA, 30 bp, Artificial Sequence
  Synthetic primer
acgttggatgtcagctatctaatccctggc

SEQ ID NO: 152 - DNA, 30 bp, Artificial Sequence
  Synthetic primer
acgttggatgagctgggactttccttcttg

SEQ ID NO: 153 - DNA, 30 bp, Artificial Sequence
  Synthetic primer
acgttggatgttcttgaatacggtcactgc

SEQ ID NO: 154 - DNA, 30 bp, Artificial Sequence
  Synthetic primer
acgttggatgctgaaggctggatttactgg

SEQ ID NO: 155 - DNA, 30 bp, Artificial Sequence
  Synthetic primer
acgttggatgagctggaggtcagagttttc

SEQ ID NO: 156 - DNA, 30 bp, Artificial Sequence
  Synthetic primer
acgttggatgcctgagaccctgtctctaaa

SEQ ID NO: 157 - DNA, 30 bp, Artificial Sequence
  Synthetic primer
acgttggatgtcatctgaggttgggagttc

SEQ ID NO: 158 - DNA, 30 bp, Artificial Sequence
  Synthetic primer
acgttggatgcgacaccacacaaggctaat

SEQ ID NO: 159 - DNA, 30 bp, Artificial Sequence
  Synthetic primer
acgttggatgaggtggatcatctgaggttg

SEQ ID NO: 160 - DNA, 30 bp, Artificial Sequence
  Synthetic primer
acgttggatggacagggtttctccatgttg

SEQ ID NO: 161 - DNA, 30 bp, Artificial Sequence
  Synthetic primer
acgttggatgaccgtgcccggccttttttt

SEQ ID NO: 162 - DNA, 30 bp, Artificial Sequence
  Synthetic primer
acgttggatgatcgaaccactgcactcctg

SEQ ID NO: 163 - DNA, 30 bp, Artificial Sequence
  Synthetic primer
acgttggatgtaaggcaggaggatggagtg

SEQ ID NO: 164 - DNA, 30 bp, Artificial Sequence
  Synthetic primer
acgttggatggacagagtctcactctgtcg

SEQ ID NO: 165 - DNA, 30 bp, Artificial Sequence
  Synthetic primer
acgttggatggtttcaccgtgttagccagg

SEQ ID NO: 166 - DNA, 31 bp, Artificial Sequence
  Synthetic primer
acgttggatgacatggtggctcacgcctgta

SEQ ID NO: 167 - DNA, 30 bp, Artificial Sequence
  Synthetic primer
acgttggatgactgggattacagatgtgag

SEQ ID NO: 168 - DNA, 30 bp, Artificial Sequence
  Synthetic primer
acgttggatggtgcttaaaagggatgaatc

SEQ ID NO: 169 - DNA, 30 bp, Artificial Sequence
  Synthetic primer
acgttggatggtacataagcaggaggtttc

SEQ ID NO: 170 - DNA, 30 bp, Artificial Sequence
  Synthetic primer
acgttggatgtctgtacaaacaaccatgac

SEQ ID NO: 171 - DNA, 30 bp, Artificial Sequence
  Synthetic primer
acgttggatgacagagtcgctgtacataag

SEQ ID NO: 172 - DNA, 30 bp, Artificial Sequence
  Synthetic primer
acgttggatggtacaaacaaccatgactac

SEQ ID NO: 173 - DNA, 30 bp, Artificial Sequence
  Synthetic primer
acgttggatgtgtacagcgactctgtctac

SEQ ID NO: 174 - DNA, 30 bp, Artificial Sequence
  Synthetic primer
acgttggatgctctgaacctcagtttcctg

SEQ ID NO: 175 - DNA, 30 bp, Artificial Sequence
  Synthetic primer
acgttggatgtctcctacctttaatagccc

SEQ ID NO: 176 - DNA, 30 bp, Artificial Sequence
  Synthetic primer
acgttggatgttctttgctgtgggtaagtg

SEQ ID NO: 177 - DNA, 30 bp, Artificial Sequence
  Synthetic primer
acgttggatgctgggtatcaaatgcaggac

SEQ ID NO: 178 - DNA, 30 bp, Artificial Sequence
  Synthetic primer
acgttggatgagagtgagagtctctctcag

SEQ ID NO: 179 - DNA, 30 bp, Artificial Sequence
  Synthetic primer
acgttggatgtaatcccaacactttggggg

SEQ ID NO: 180 - DNA, 30 bp, Artificial Sequence
  Synthetic primer
acgttggatgaacaccacgcctggctaatt

SEQ ID NO: 181 - DNA, 30 bp, Artificial Sequence
  Synthetic primer
acgttggatgtttcactatattggccaggc

SEQ ID NO: 182 - DNA, 30 bp, Artificial Sequence
  Synthetic primer
acgttggatgtgtaatcccaacactttggg

SEQ ID NO: 183 - DNA, 30 bp, Artificial Sequence
  Synthetic primer
acgttggatgccacacgcagcctttttgtt

SEQ ID NO: 184 - DNA, 30 bp, Artificial Sequence
  Synthetic primer
acgttggatggaactgtgatcatgccactg

SEQ ID NO: 185 - DNA, 30 bp, Artificial Sequence
  Synthetic primer
acgttggatgaggcttgtcttgaactcctg

SEQ ID NO: 186 - DNA, 30 bp, Artificial Sequence
  Synthetic primer
acgttggatgtgatggctcaggctgtaatc

SEQ ID NO: 187 - DNA, 30 bp, Artificial Sequence
  Synthetic primer
acgttggatgaaagtgctaggattacagcc

SEQ ID NO: 188 - DNA, 30 bp, Artificial Sequence
  Synthetic primer
acgttggatgtaaatgagcctggcctagac

SEQ ID NO: 189 - DNA, 30 bp, Artificial Sequence
  Synthetic primer
acgttggatgaggtccacttcaccagacac

SEQ ID NO: 190 - DNA, 30 bp, Artificial Sequence
  Synthetic primer
acgttggatgtaaggttcttgcccactggc

SEQ ID NO: 191 - DNA, 29 bp, Artificial Sequence
  Synthetic primer
acgttggatgaccgtggtcgtgacctcag

SEQ ID NO: 192 - DNA, 30 bp, Artificial Sequence
  Synthetic primer
acgttggatgaacctcaccgtggtgctgct

SEQ ID NO: 193 - DNA, 29 bp, Artificial Sequence
  Synthetic primer
acgttggatgacagcccgtccagggaaca

SEQ ID NO: 194 - DNA, 29 bp, Artificial Sequence
  Synthetic primer
acgttggatgtcctagaggtggacacgca

SEQ ID NO: 195 - DNA, 31 bp, Artificial Sequence
  Synthetic primer
acgttggatgtcaacctctggtcccccagtg

SEQ ID NO: 196 - DNA, 29 bp, Artificial Sequence
  Synthetic primer
acgttggatgaggggaccgtggtctgttc

SEQ ID NO: 197 - DNA, 30 bp, Artificial Sequence
  Synthetic primer
acgttggatgtcctagaggtggacacgcag

SEQ ID NO: 198 - DNA, 31 bp, Artificial Sequence
  Synthetic primer
acgttggatgtggacctgggcctccgagact

SEQ ID NO: 199 - DNA, 30 bp, Artificial Sequence
  Synthetic primer
acgttggatgtatggcaacgactccttctc

SEQ ID NO: 200 - DNA, 30 bp, Artificial Sequence
  Synthetic primer
acgttggatgtattactgcacacgtcagcc

SEQ ID NO: 201 - DNA, 30 bp, Artificial Sequence
  Synthetic primer
acgttggatgtaaggcctcagtcagtgtga

SEQ ID NO: 202 - DNA, 30 bp, Artificial Sequence
  Synthetic primer
acgttggatgagtattactgcacacgtcag

SEQ ID NO: 203 - DNA, 30 bp, Artificial Sequence
  Synthetic primer
acgttggatgaaagcctggaataggcacac

SEQ ID NO: 204 - DNA, 30 bp, Artificial Sequence
  Synthetic primer
acgttggatgtgcagacagtgaccatctac

SEQ ID NO: 205 - DNA, 30 bp, Artificial Sequence
  Synthetic primer
acgttggatgtcacacttcactgtcacctc

SEQ ID NO: 206 - DNA, 30 bp, Artificial Sequence
  Synthetic primer
acgttggatgtgtgcctattccaggctttc

SEQ ID NO: 207 - DNA, 30 bp, Artificial Sequence
  Synthetic primer
acgttggatgctagagccaaggtgacgctg

SEQ ID NO: 208 - DNA, 30 bp, Artificial Sequence
  Synthetic primer
acgttggatgtggccttcagcaggagctgg

SEQ ID NO: 209 - DNA, 30 bp, Artificial Sequence
  Synthetic primer
acgttggatgagcttctcctgctctgcaac

SEQ ID NO: 210 - DNA, 30 bp, Artificial Sequence
  Synthetic primer
acgttggatgtcacacaggacacgaagctc

SEQ ID NO: 211 - DNA, 30 bp, Artificial Sequence
  Synthetic primer
acgttggatgaaggtcttgcctccaagtcc

SEQ ID NO: 212 - DNA, 30 bp, Artificial Sequence
  Synthetic primer
acgttggatgacaatccctctcgtccagtc

SEQ ID NO: 213 - DNA, 30 bp, Artificial Sequence
  Synthetic primer
acgttggatgctccatgtcatctcatcgtg

SEQ ID NO: 214 - DNA, 30 bp, Artificial Sequence
  Synthetic primer
acgttggatgaattttctggccacgtccag

SEQ ID NO: 215 - DNA, 30 bp, Artificial Sequence
  Synthetic primer
acgttggatgctcacagagcacattcacgg

SEQ ID NO: 216 - DNA, 30 bp, Artificial Sequence
  Synthetic primer
acgttggatgagatcttgagggcacctacc

SEQ ID NO: 217 - DNA, 30 bp, Artificial Sequence
  Synthetic primer
acgttggatgggacctaatgcaatcctcac

SEQ ID NO: 218 - DNA, 30 bp, Artificial Sequence
  Synthetic primer
acgttggatggctaccacagtgatgatgac

SEQ ID NO: 219 - DNA, 30 bp, Artificial Sequence
  Synthetic primer
acgttggatgactgccaccaatatgggaag

SEQ ID NO: 220 - DNA, 30 bp, Artificial Sequence
  Synthetic primer
acgttggatgaaaccgaacacacaagccac

SEQ ID NO: 221 - DNA, 30 bp, Artificial Sequence
  Synthetic primer
acgttggatgggaagacatatgccatgcag

SEQ ID NO: 222 - DNA, 30 bp, Artificial Sequence
  Synthetic primer
acgttggatgatctgactgaggacaatgcc

SEQ ID NO: 223 - DNA, 30 bp, Artificial Sequence
  Synthetic primer
acgttggatgggccacttcttctgtaagtc

SEQ ID NO: 224 - DNA, 30 bp, Artificial Sequence
  Synthetic primer
acgttggatgcatgaggacatacaactggg

SEQ ID NO: 225 - DNA, 30 bp, Artificial Sequence
  Synthetic primer
acgttggatggtacaactgtacctggtgac

SEQ ID NO: 226 - DNA, 30 bp, Artificial Sequence
  Synthetic primer
acgttggatgaatgaacataggtctctggc

SEQ ID NO: 227 - DNA, 30 bp, Artificial Sequence
  Synthetic primer
acgttggatgttgtacaggttgtacactgc

SEQ ID NO: 228 - DNA, 30 bp, Artificial Sequence
  Synthetic primer
acgttggatgaggttggccaatgagaagtc

SEQ ID NO: 229 - DNA, 30 bp, Artificial Sequence
  Synthetic primer
acgttggatgctgtgaaccattaccagtcc

SEQ ID NO: 230 - DNA, 30 bp, Artificial Sequence
  Synthetic primer
acgttggatgacttctcattggccaacctg

SEQ ID NO: 231 - DNA, 30 bp, Artificial Sequence
  Synthetic primer
acgttggatgatattccctgggcactcatg

SEQ ID NO: 232 - DNA, 30 bp, Artificial Sequence
  Synthetic primer
acgttggatgtccccacccacatacatttc

SEQ ID NO: 233 - DNA, 30 bp, Artificial Sequence
  Synthetic primer
acgttggatgcatggttcactgcagtcttg

SEQ ID NO: 234 - DNA, 30 bp, Artificial Sequence
  Synthetic primer
acgttggatgtgtggtgttgtgagcctatg

SEQ ID NO: 235 - DNA, 30 bp, Artificial Sequence
  Synthetic primer
acgttggatgaggaagtctgggcaatgttg

SEQ ID NO: 236 - DNA, 30 bp, Artificial Sequence
  Synthetic primer
acgttggatgataggctcacaacaccacac

SEQ ID NO: 237 - DNA, 30 bp, Artificial Sequence; identical to SEQ ID NO: 236
  Synthetic primer

SEQ ID NO: 238 - DNA, 30 bp, Artificial Sequence
  Synthetic primer
acgttggatgaacacaaaggaagtctgggc

SEQ ID NO: 239 - DNA, 30 bp, Artificial Sequence
  Synthetic primer
acgttggatgagagacccagaaggtcatag

SEQ ID NO: 240 - DNA, 30 bp, Artificial Sequence
  Synthetic primer
acgttggatgcctcccccaagaaaacattg

SEQ ID NO: 241 - DNA, 30 bp, Artificial Sequence
  Synthetic primer
acgttggatgtgcgcaggaaaaacacgctg

SEQ ID NO: 242 - DNA, 30 bp, Artificial Sequence
  Synthetic primer
acgttggatgactgtcaactacccttcccc

SEQ ID NO: 243 - DNA, 30 bp, Artificial Sequence
  Synthetic primer
acgttggatgattaggaacggaacacaggg

SEQ ID NO: 244 - DNA, 30 bp, Artificial Sequence
  Synthetic primer
acgttggatgagagagttatgaccccgaga

SEQ ID NO: 245 - DNA, 30 bp, Artificial Sequence
  Synthetic primer
acgttggatgttgcgatcactttctccaag

SEQ ID NO: 246 - DNA, 30 bp, Artificial Sequence
  Synthetic primer
acgttggatgctgagtgaggaaacctcagg

SEQ ID NO: 247 - DNA, 31 bp, Artificial Sequence
  Synthetic primer
acgttggatgacctgaggtttcctcactcag

SEQ ID NO: 248 - DNA, 30 bp, Artificial Sequence
  Synthetic primer
acgttggatgagaggtttctgtgacacccg

SEQ ID NO: 249 - DNA, 30 bp, Artificial Sequence
  Synthetic primer
acgttggatgggcagctctgattggatgtt

SEQ ID NO: 250 - DNA, 30 bp, Artificial Sequence
  Synthetic primer
acgttggatgctccacagttgtttggcctc

SEQ ID NO: 251 - DNA, 30 bp, Artificial Sequence
  Synthetic primer
acgttggatgatgcttttgactccgcttcc

SEQ ID NO: 252 - DNA, 30 bp, Artificial Sequence
  Synthetic primer
acgttggatgatgttctggtagtcacccag

SEQ ID NO: 253 - DNA, 30 bp, Artificial Sequence
  Synthetic primer
acgttggatgcttgttctcgcgtggatgtc

SEQ ID NO: 254 - DNA, 30 bp, Artificial Sequence
  Synthetic primer
acgttggatgtactcagcgtgtgtgagctc

SEQ ID NO: 255 - DNA, 30 bp, Artificial Sequence
  Synthetic primer
acgttggatggcggagccatacctctaagc

SEQ ID NO: 256 - DNA, 29 bp, Artificial Sequence
  Synthetic primer
acgttggatgtcgctggcactttcgtccc

SEQ ID NO: 257 - DNA, 30 bp, Artificial Sequence
  Synthetic primer
acgttggatgctggctgagatgccatgata

SEQ ID NO: 258 - DNA, 30 bp, Artificial Sequence
  Synthetic primer
acgttggatgatggtgggaggagctaaatg

SEQ ID NO: 259 - DNA, 29 bp, Artificial Sequence
  Synthetic primer
acgttggatgcgccccctccttggaaacc

SEQ ID NO: 260 - DNA, 29 bp, Artificial Sequence
  Synthetic primer
acgttggatggcgcggcgggtggggtgtg

SEQ ID NO: 261 - DNA, 29 bp, Artificial Sequence
  Synthetic primer
acgttggatggctcttcggcctctcaggt

SEQ ID NO: 262 - DNA, 30 bp, Artificial Sequence
  Synthetic primer
acgttggatgaggccgtttctcaggtccag

SEQ ID NO: 263 - DNA, 30 bp, Artificial Sequence
  Synthetic primer
acgttggatgagtccctggacctgagaaac

SEQ ID NO: 264 - DNA, 30 bp, Artificial Sequence
  Synthetic primer
acgttggatgagaagactcaggctcgaggt

SEQ ID NO: 265 - DNA, 30 bp, Artificial Sequence
  Synthetic primer
acgttggatgaagatgccagtccgtggacc

SEQ ID NO: 266 - DNA, 30 bp, Artificial Sequence
  Synthetic primer
acgttggatgagtgtctctcctgtccgctc

SEQ ID NO: 267 - DNA, 30 bp, Artificial Sequence
  Synthetic primer
acgttggatgtacctccttacgctgtgctg

SEQ ID NO: 268 - DNA, 30 bp, Artificial Sequence
  Synthetic primer
acgttggatgagttggagagatggagtctt

SEQ ID NO: 269 - DNA, 30 bp, Artificial Sequence
  Synthetic primer
acgttggatgaactaccctgactcagaggc

SEQ ID NO: 270 - DNA, 30 bp, Artificial Sequence
  Synthetic primer
acgttggatgctgggctcatggaaggaacc

SEQ ID NO: 271 - DNA, 30 bp, Artificial Sequence
  Synthetic primer
acgttggatgttccttccatgagcccagcc

SEQ ID NO: 272 - DNA, 30 bp, Artificial Sequence
  Synthetic primer
acgttggatgggtcaaggatcaggaaggac

SEQ ID NO: 273 - DNA, 30 bp, Artificial Sequence
  Synthetic primer
acgttggatgtgtctctgggacgtggtagc

SEQ ID NO: 274 - DNA, 30 bp, Artificial Sequence
  Synthetic primer
acgttggatgtttcctctcctctacgccct

SEQ ID NO: 275 - DNA, 30 bp, Artificial Sequence
  Synthetic primer
acgttggatgagccagggaaagaacccagg

SEQ ID NO: 276 - DNA, 30 bp, Artificial Sequence
  Synthetic primer
acgttggatgtttagactctgggagtgcgc

SEQ ID NO: 277 - DNA, 30 bp, Artificial Sequence
  Synthetic primer
acgttggatgtttaaaccggaggcctgggc

SEQ ID NO: 278 - DNA, 30 bp, Artificial Sequence
  Synthetic primer
acgttggatgtcaagggttctcagagggcg

SEQ ID NO: 279 - DNA, 30 bp, Artificial Sequence
  Synthetic primer
acgttggatgggctgaattgcagcaccaac

SEQ ID NO: 280 - DNA, 30 bp, Artificial Sequence
  Synthetic primer
acgttggatgaaccaacgcaaacccctctg

SEQ ID NO: 281 - DNA, 30 bp, Artificial Sequence
  Synthetic primer
acgttggatgatcagctctacgcgatctgg

SEQ ID NO: 282 - DNA, 31 bp, Artificial Sequence
  Synthetic primer
acgttggatgttcaggccccaccttctgttc

SEQ ID NO: 283 - DNA, 30 bp, Artificial Sequence
  Synthetic primer
acgttggatgcctaagcacttgacatgcac

SEQ ID NO: 284 - DNA, 30 bp, Artificial Sequence
  Synthetic primer
acgttggatgatgctgaccccgacttcaac

SEQ ID NO: 285 - DNA, 30 bp, Artificial Sequence
  Synthetic primer
acgttggatgaatgctgaccccgacttcaa

SEQ ID NO: 286 - DNA, 30 bp, Artificial Sequence
  Synthetic primer
acgttggatggcacttgacatgcactatct

SEQ ID NO: 287 - DNA, 30 bp, Artificial Sequence
  Synthetic primer
acgttggatgttttcgccccccagggtgac

SEQ ID NO: 288 - DNA, 30 bp, Artificial Sequence
  Synthetic primer
acgttggatgacagccacagctagcgcaga

SEQ ID NO: 289 - DNA, 30 bp, Artificial Sequence
  Synthetic primer
acgttggatggggacctcagtaccggaaca

SEQ ID NO: 290 - DNA, 30 bp, Artificial Sequence
  Synthetic primer
acgttggatgctccccagcgattacgtctc

SEQ ID NO: 291 - DNA, 30 bp, Artificial Sequence
  Synthetic primer
acgttggatggggcagatggtgacagtaac

SEQ ID NO: 292 - DNA, 30 bp, Artificial Sequence
  Synthetic primer
acgttggatgtggaactccctccagtgtga

SEQ ID NO: 293 - DNA, 30 bp, Artificial Sequence
  Synthetic primer
acgttggatgaccttctggtgacttccaag

SEQ ID NO: 294 - DNA, 30 bp, Artificial Sequence
  Synthetic primer
acgttggatgagacgtaagaaatggctccg

SEQ ID NO: 295 - DNA, 30 bp, Artificial Sequence
  Synthetic primer
acgttggatgccagaccttgaaccagatag

SEQ ID NO: 296 - DNA, 30 bp, Artificial Sequence
  Synthetic primer
acgttggatgtcaaggacgtaacgctaacg

SEQ ID NO: 297 - DNA, 30 bp, Artificial Sequence
  Synthetic primer
acgttggatgaccctccagaccttgaacca

SEQ ID NO: 298 - DNA, 30 bp, Artificial Sequence
  Synthetic primer
acgttggatgacgtaacgctaacggtggag

SEQ ID NO: 299 - DNA, 30 bp, Artificial Sequence
  Synthetic primer
acgttggatgtagtcgagccatgcactctg

SEQ ID NO: 300 - DNA, 30 bp, Artificial Sequence
  Synthetic primer
acgttggatgggcagtccagagtgtttaag

SEQ ID NO: 301 - DNA, 30 bp, Artificial Sequence
  Synthetic primer
acgttggatgtcaggaagctcccagacaga

SEQ ID NO: 302 - DNA, 30 bp, Artificial Sequence
  Synthetic primer
acgttggatgataacccttggacgccgatc

SEQ ID NO: 303 - DNA, 30 bp, Artificial Sequence
  Synthetic primer
acgttggatgccaaagccaacaatacactc

SEQ ID NO: 304 - DNA, 30 bp, Artificial Sequence
  Synthetic primer
acgttggatgcagccaagtaatgcgttctg

SEQ ID NO: 305 - DNA, 30 bp, Artificial Sequence
  Synthetic primer
acgttggatgattctgggagctctgggact

SEQ ID NO: 306 - DNA, 30 bp, Artificial Sequence
  Synthetic primer
acgttggatgagccaagcgtgaagtgcgtg

SEQ ID NO: 307 - DNA, 30 bp, Artificial Sequence
  Synthetic primer
acgttggatggattcatccatctccggtgg

SEQ ID NO: 308 - DNA, 30 bp, Artificial Sequence
  Synthetic primer
acgttggatgtccaggcactccctgacatc

SEQ ID NO: 309 - DNA, 30 bp, Artificial Sequence
  Synthetic primer
acgttggatgaagcgattctcctgcctcag

SEQ ID NO: 310 - DNA, 30 bp, Artificial Sequence
  Synthetic primer
acgttggatgtggcgaaaacccgtctctac

SEQ ID NO: 311 - DNA, 30 bp, Artificial Sequence
  Synthetic primer
acgttggatgaagaggatcctgcctcctat

SEQ ID NO: 312 - DNA, 30 bp, Artificial Sequence
  Synthetic primer
acgttggatggaagggcgaggaattttagc

SEQ ID NO: 313 - DNA, 30 bp, Artificial Sequence
  Synthetic primer
acgttggatgtgcgcccaggaggaaacttc

SEQ ID NO: 314 - DNA, 29 bp, Artificial Sequence
  Synthetic primer
acgttggatgcagctgatctgggctggag

SEQ ID NO: 315 - DNA, 30 bp, Artificial Sequence
  Synthetic primer
acgttggatgctgttgttgctcgacaggcc

SEQ ID NO: 316 - DNA, 29 bp, Artificial Sequence
  Synthetic primer
acgttggatgtggcctccagcccagatca

SEQ ID NO: 317 - DNA, 30 bp, Artificial Sequence
  Synthetic primer
acgttggatgtgagcgtggcaggcgccatg

SEQ ID NO: 318 - DNA, 29 bp, Artificial Sequence
  Synthetic primer
acgttggatggcgtggcgcccgtgcgcgt

SEQ ID NO: 319 - DNA, 29 bp, Artificial Sequence
  Synthetic primer
acgttggatgggcgcatcacggtgcgcgt

SEQ ID NO: 320 - DNA, 30 bp, Artificial Sequence
  Synthetic primer
acgttggatgaagacccaggtcacgccccc

SEQ ID NO: 321 - DNA, 30 bp, Artificial Sequence
  Synthetic primer
acgttggatgtctcagatacctcgccccgc

SEQ ID NO: 322 - DNA, 29 bp, Artificial Sequence
  Synthetic primer
acgttggatgcgcatcacggtgcgcgtgg

SEQ ID NO: 323 - DNA, 29 bp, Artificial Sequence
  Synthetic primer
acgttggatgggcgaggtatctgagaggg

SEQ ID NO: 324 - DNA, 30 bp, Artificial Sequence
  Synthetic primer
acgttggatgtactctgtcccacttccgtc

SEQ ID NO: 325 - DNA, 29 bp, Artificial Sequence
  Synthetic primer
acgttggatggggcgaggtatctgagagg

SEQ ID NO: 326 - DNA, 30 bp, Artificial Sequence
  Synthetic primer
acgttggatgctttgacttctactctgtcc

SEQ ID NO: 327 - DNA, 30 bp, Artificial Sequence
  Synthetic primer
acgttggatgtcaaagtgcgatcaacagcc

SEQ ID NO: 328 - DNA, 29 bp, Artificial Sequence
  Synthetic primer
acgttggatgctctcggtcccggtagact

SEQ ID NO: 329 - DNA, 30 bp, Artificial Sequence
  Synthetic primer
acgttggatgcggtagactagacggaagtg

SEQ ID NO: 330 - DNA, 30 bp, Artificial Sequence
  Synthetic primer
acgttggatgaaagtgcgatcaacagcccc

SEQ ID NO: 331 - DNA, 30 bp, Artificial Sequence
  Synthetic primer
acgttggatgatcttccccacagtggattg

SEQ ID NO: 332 - DNA, 30 bp, Artificial Sequence
  Synthetic primer
acgttggatgactgctgcaggaaaggactt

SEQ ID NO: 333 - DNA, 30 bp, Artificial Sequence
  Synthetic primer
acgttggatgtgagagaaggcgatcttgac

SEQ ID NO: 334 - DNA, 30 bp, Artificial Sequence
  Synthetic primer
acgttggatgccaattcacaatccactgtg

SEQ ID NO: 335 - DNA, 30 bp, Artificial Sequence
  Synthetic primer
acgttggatgaggccgagagctcaggcgag

SEQ ID NO: 336 - DNA, 31 bp, Artificial Sequence
  Synthetic primer
acgttggatgtcgggtccgccctccgcgcct

SEQ ID NO: 337 - DNA, 30 bp, Artificial Sequence
  Synthetic primer
acgttggatgtattcaactccaagggcgtc

SEQ ID NO: 338 - DNA, 30 bp, Artificial Sequence
  Synthetic primer
acgttggatgagaaacagaagcggagacag

SEQ ID NO: 339 - DNA, 30 bp, Artificial Sequence
  Synthetic primer
acgttggatgacccccattttctacccatc

SEQ ID NO: 340 - DNA, 30 bp, Artificial Sequence
  Synthetic primer
acgttggatgttgcagaaacagaagcggag

SEQ ID NO: 341 - DNA, 30 bp, Artificial Sequence
  Synthetic primer
acgttggatgtgtctccgcttctgtttctg

SEQ ID NO: 342 - DNA, 30 bp, Artificial Sequence
  Synthetic primer
acgttggatgtgaataactcgggaggtcac

SEQ ID NO: 343 - DNA, 30 bp, Artificial Sequence
  Synthetic primer
acgttggatgaccccaggccctctcaaaaa

SEQ ID NO: 344 - DNA, 30 bp, Artificial Sequence
  Synthetic primer
acgttggatgtctgcaaggtggaacaagcc

SEQ ID NO: 345 - DNA, 30 bp, Artificial Sequence
  Synthetic primer
acgttggatgcggtggctcatgcgtgtaat

SEQ ID NO: 346 - DNA, 30 bp, Artificial Sequence
  Synthetic primer
acgttggatgctcccgaatagctgggacta

SEQ ID NO: 347 - DNA, 30 bp, Artificial Sequence
  Synthetic primer
acgttggatgtaacacggtgaaaccccgtc

SEQ ID NO: 348 - DNA, 30 bp, Artificial Sequence
  Synthetic primer
acgttggatgtgagtagctgggactacagg

SEQ ID NO: 349 - DNA, 30 bp, Artificial Sequence
  Synthetic primer
acgttggatgagacagcaagactccgtctc

SEQ ID NO: 350 - DNA, 30 bp, Artificial Sequence
  Synthetic primer
acgttggatgcccgccttagtttcccaaag

SEQ ID NO: 351 - DNA, 30 bp, Artificial Sequence
  Synthetic primer
acgttggatgtggctaacatggtgaaaccc

SEQ ID NO: 352 - DNA, 30 bp, Artificial Sequence
  Synthetic primer
acgttggatgttgagtagctgggactacag

SEQ ID NO: 353 - DNA, 30 bp, Artificial Sequence
  Synthetic primer
acgttggatggtttgtttttagagacaggg

SEQ ID NO: 354 - DNA, 30 bp, Artificial Sequence
  Synthetic primer
acgttggatggtcaaagccacttccagcta

SEQ ID NO: 355 - DNA, 30 bp, Artificial Sequence
  Synthetic primer
acgttggatgaagaggctatgtggcagatg

SEQ ID NO: 356 - DNA, 30 bp, Artificial Sequence
  Synthetic primer
acgttggatgagggtgaagctgggtttaac

SEQ ID NO: 357 - DNA, 30 bp, Artificial Sequence
  Synthetic primer
acgttggatgtaacgtagagcacaggtgag

SEQ ID NO: 358 - DNA, 30 bp, Artificial Sequence
  Synthetic primer
acgttggatgcaacgcaaacaccagtgtgg

SEQ ID NO: 359 - DNA, 30 bp, Artificial Sequence
  Synthetic primer
acgttggatgaagagacagtggagaggctg

SEQ ID NO: 360 - DNA, 31 bp, Artificial Sequence
  Synthetic primer
acgttggatgagagccatcgggtcccagcaa

SEQ ID NO: 361 - DNA, 30 bp, Artificial Sequence
  Synthetic primer
acgttggatgtcgataaccccagcaaagag

SEQ ID NO: 362 - DNA, 30 bp, Artificial Sequence
  Synthetic primer
acgttggatgtaaggccaaaccccattccc

SEQ ID NO: 363 - DNA, 30 bp, Artificial Sequence
  Synthetic primer
acgttggatgagattgtgctgacaccggag

SEQ ID NO: 364 - DNA, 30 bp, Artificial Sequence
  Synthetic primer
acgttggatgccacgtagaagttcctggtg

SEQ ID NO: 365 - DNA, 30 bp, Artificial Sequence
  Synthetic primer
acgttggatgtgcgctcagtcagcttcctc

SEQ ID NO: 366 - DNA, 30 bp, Artificial Sequence
  Synthetic primer
acgttggatgagtgttagccgagggcaagc

SEQ ID NO: 367 - DNA, 30 bp, Artificial Sequence
  Synthetic primer
acgttggatggttgggattacaggcatgag

SEQ ID NO: 368 - DNA, 30 bp, Artificial Sequence
  Synthetic primer
acgttggatgatctgttgcctgtcaagatg

SEQ ID NO: 369 - DNA, 30 bp, Artificial Sequence
  Synthetic primer
acgttggatgggtgggaaaaagacgtgaag

SEQ ID NO: 370 - DNA, 30 bp, Artificial Sequence
  Synthetic primer
acgttggatgagagggaattaaggaggtcc

SEQ ID NO: 371 - DNA, 30 bp, Artificial Sequence
  Synthetic primer
acgttggatgaagacgtgaagagacacacc

SEQ ID NO: 372 - DNA, 30 bp, Artificial Sequence; identical to SEQ ID NO: 370
  Synthetic primer

SEQ ID NO: 373 - DNA, 31 bp, Artificial Sequence
  Synthetic primer
acgttggatgacttggccccctgcactcaca

SEQ ID NO: 374 - DNA, 31 bp, Artificial Sequence
  Synthetic primer
acgttggatgaccgtgttttccaggctcgcg

SEQ ID NO: 375 - DNA, 30 bp, Artificial Sequence
  Synthetic primer
acgttggatgatgcatgtcatggccgcctc

SEQ ID NO: 376 - DNA, 31 bp, Artificial Sequence
  Synthetic primer
acgttggatgttccaccaggtgcccctggca

SEQ ID NO: 377 - DNA, 30 bp, Artificial Sequence
  Synthetic primer
acgttggatgttcaacaagcgagtgacagc

SEQ ID NO: 378 - DNA, 30 bp, Artificial Sequence
  Synthetic primer
acgttggatggtgcagagatgggctttctc

SEQ ID NO: 379 - DNA, 30 bp, Artificial Sequence
  Synthetic primer
acgttggatggacaattgtagtacccagcc

SEQ ID NO: 380 - DNA, 30 bp, Artificial Sequence
  Synthetic primer
acgttggatgaggagaatcgcttgaacctg

SEQ ID NO: 381 - DNA, 30 bp, Artificial Sequence
  Synthetic primer
acgttggatgcaaagtgctaggatcacagg

SEQ ID NO: 382 - DNA, 30 bp, Artificial Sequence
  Synthetic primer
acgttggatgactgccccatagagtggcaa

SEQ ID NO: 383 - DNA, 30 bp, Artificial Sequence
  Synthetic primer
acgttggatgatcctcacacctcagtctcc

SEQ ID NO: 384 - DNA, 30 bp, Artificial Sequence
  Synthetic primer
acgttggatgaatgagactccgtctctacc

SEQ ID NO: 385 - DNA, 29 bp, Artificial Sequence
  Synthetic primer
acgttggatgccagcggcccagctcactc

SEQ ID NO: 386 - DNA, 30 bp, Artificial Sequence
  Synthetic primer
acgttggatgtctgaggccagagcctcgga

SEQ ID NO: 387 - DNA, 30 bp, Artificial Sequence
  Synthetic primer
acgttggatgacctgtgtttctaggtgtgc

SEQ ID NO: 388 - DNA, 30 bp, Artificial Sequence
  Synthetic primer
acgttggatgcatgcctgggaaaaaactcc

SEQ ID NO: 389 - DNA, 30 bp, Artificial Sequence
  Synthetic primer
acgttggatgaacctcaagctgcttcactg

SEQ ID NO: 390 - DNA, 30 bp, Artificial Sequence
  Synthetic primer
acgttggatggaggagcccacctttaatgt

SEQ ID NO: 391 - DNA, 30 bp, Artificial Sequence
  Synthetic primer
acgttggatgagaaatcctcctaccttggc

SEQ ID NO: 392 - DNA, 30 bp, Artificial Sequence
  Synthetic primer
acgttggatggcccggcctctacataaaat

SEQ ID NO: 393 - DNA, 30 bp, Artificial Sequence
  Synthetic primer
acgttggatgccaggactgtctctctgttt

SEQ ID NO: 394 - DNA, 30 bp, Artificial Sequence
  Synthetic primer
acgttggatgatgacactacagcctgagca

SEQ ID NO: 395 - DNA, 30 bp, Artificial Sequence
  Synthetic primer
acgttggatgtacatgaagaaggactcggc

SEQ ID NO: 396 - DNA, 30 bp, Artificial Sequence
  Synthetic primer
acgttggatgatccgtccagtgcacgtaga

SEQ ID NO: 397 - DNA, 30 bp, Artificial Sequence
  Synthetic primer
acgttggatggcagccgagtccttcttcat

SEQ ID NO: 398 - DNA, 30 bp, Artificial Sequence
  Synthetic primer
acgttggatgttcctggtctacagtgagcg

SEQ ID NO: 399 - DNA, 30 bp, Artificial Sequence
  Synthetic primer
acgttggatgacacacagcagggcatccgt

SEQ ID NO: 400 - DNA, 30 bp, Artificial Sequence
  Synthetic primer
acgttggatgcgcaatcaatgctttccacc

SEQ ID NO: 401 - DNA, 30 bp, Artificial Sequence
  Synthetic primer
acgttggatgatcttcagggatggtcactc

SEQ ID NO: 402 - DNA, 30 bp, Artificial Sequence
  Synthetic primer
acgttggatggacaaatacaaagggacagg

SEQ ID NO: 403 - DNA, 30 bp, Artificial Sequence
  Synthetic primer
acgttggatgtgacctcaggtgattcaccc

SEQ ID NO: 404 - DNA, 30 bp, Artificial Sequence
  Synthetic primer
acgttggatgggtatacctttagctggctg

SEQ ID NO: 405 - DNA, 30 bp, Artificial Sequence
  Synthetic primer
acgttggatgcttttctccacccactctac

SEQ ID NO: 406 - DNA, 30 bp, Artificial Sequence
  Synthetic primer
acgttggatgtaaacgcgtgatatggaggg

SEQ ID NO: 407 - DNA, 30 bp, Artificial Sequence
  Synthetic primer
acgttggatgagcggcagttaccatgttag

SEQ ID NO: 408 - DNA, 30 bp, Artificial Sequence
  Synthetic primer
acgttggatgttcttcccccattgcttctg

SEQ ID NO: 409 - DNA, 30 bp, Artificial Sequence
  Synthetic primer
acgttggatgggtgatggacattgagggtg

SEQ ID NO: 410 - DNA, 29 bp, Artificial Sequence
  Synthetic primer
acgttggatgtcccttctgtctccaaccc

SEQ ID NO: 411 - DNA, 30 bp, Artificial Sequence
  Synthetic primer
acgttggatggaatgcgacagtcatgaacc

SEQ ID NO: 412 - DNA, 29 bp, Artificial Sequence
  Synthetic primer
acgttggatgcccctagggtcacgttgca

SEQ ID NO: 413 - DNA, 30 bp, Artificial Sequence
  Synthetic primer
acgttggatgtatcttgctgactgggtcac

SEQ ID NO: 414 - DNA, 30 bp, Artificial Sequence
  Synthetic primer
acgttggatgcgtgggatctttgaagaagg

SEQ ID NO: 415 - DNA, 30 bp, Artificial Sequence
  Synthetic primer
acgttggatgtgggccagaacttcaccctg

SEQ ID NO: 416 - DNA, 29 bp, Artificial Sequence
  Synthetic primer
acgttggatgaagcagcaccaccgtgagg

SEQ ID NO: 417 - DNA, 30 bp, Artificial Sequence
  Synthetic primer
acgttggatgtcaaagctcacagttctcgg

SEQ ID NO: 418 - DNA, 30 bp, Artificial Sequence
  Synthetic primer
acgttggatgacttagcgggtcctgcaaac

SEQ ID NO: 419 - DNA, 30 bp, Artificial Sequence
  Synthetic primer
acgttggatgtcccttccatcctcattttt

SEQ ID NO: 420 - DNA, 30 bp, Artificial Sequence
  Synthetic primer
acgttggatgtgcaaggcgctaaacaaaac

SEQ ID NO: 421 - DNA, 30 bp, Artificial Sequence
  Synthetic primer
acgttggatgttcctgtttatggccagacg

SEQ ID NO: 422 - DNA, 30 bp, Artificial Sequence
  Synthetic primer
acgttggatggtctgaacctgattggagag

SEQ ID NO: 423 - DNA, 30 bp, Artificial Sequence
  Synthetic primer
acgttggatgcctggacatttgtgtgtgag

SEQ ID NO: 424 - DNA, 29 bp, Artificial Sequence
  Synthetic primer
acgttggatgcatgagattgagatgcgtc

SEQ ID NO: 425 - DNA, 30 bp, Artificial Sequence
  Synthetic primer
acgttggatgcaggctcctctaacatcacc

SEQ ID NO: 426 - DNA, 30 bp, Artificial Sequence
  Synthetic primer
acgttggatgacaccactacccaagaccag

SEQ ID NO: 427 - DNA, 30 bp, Artificial Sequence
  Synthetic primer
acgttggatgaatctcagcaacgtgactgg

SEQ ID NO: 428 - DNA, 30 bp, Artificial Sequence
  Synthetic primer
acgttggatgacacggtgatgttagaggag

SEQ ID NO: 429 - DNA, 30 bp, Artificial Sequence
  Synthetic primer
acgttggatggagaggtgttaaatggtggg

SEQ ID NO: 430 - DNA, 30 bp, Artificial Sequence
  Synthetic primer
acgttggatgggaacatgaagaagtcctgg

SEQ ID NO: 431 - DNA, 30 bp, Artificial Sequence
  Synthetic primer
acgttggatgcggtctctgatggattctac

SEQ ID NO: 432 - DNA, 30 bp, Artificial Sequence
  Synthetic primer
acgttggatgaacaggccccaccatttaac

SEQ ID NO: 433 - DNA, 30 bp, Artificial Sequence
  Synthetic primer
acgttggatgtttcgggctgcaatggtccc

SEQ ID NO: 434 - DNA, 30 bp, Artificial Sequence
  Synthetic primer
acgttggatgtaacacctctctccttgtgc

SEQ ID NO: 435 - DNA, 30 bp, Artificial Sequence
  Synthetic primer
acgttggatgaaggcaccttcctctgtcag

SEQ ID NO: 436 - DNA, 31 bp, Artificial Sequence
  Synthetic primer
acgttggatgtgggccacaacacggatggta

SEQ ID NO: 437 - DNA, 30 bp, Artificial Sequence
  Synthetic primer
acgttggatggcacaaagagctaaggtagg

SEQ ID NO: 438 - DNA, 30 bp, Artificial Sequence
  Synthetic primer
acgttggatggaatcctggatagacagtgg

SEQ ID NO: 439 - DNA, 17 bp, Artificial Sequence
  Synthetic primer
agagacagggtctcgcc

SEQ ID NO: 440 - DNA, 19 bp, Artificial Sequence
  Synthetic primer
tcatccagcggcgcctcgc

SEQ ID NO: 441 - DNA, 18 bp, Artificial Sequence
  Synthetic primer
gccctgggtagcgtgggg

SEQ ID NO: 442 - DNA, 20 bp, Artificial Sequence
  Synthetic primer
gctcagaagaggtgcttcac

SEQ ID NO: 443 - DNA, 22 bp, Artificial Sequence
  Synthetic primer
ctgttgatgtgaagcacctctt

SEQ ID NO: 444 - DNA, 18 bp, Artificial Sequence
  Synthetic primer
aagggtgggcgtgggcct

SEQ ID NO: 445 - DNA, 18 bp, Artificial Sequence
  Synthetic primer
cagaagcccgtctgggct

SEQ ID NO: 446 - DNA, 20 bp, Artificial Sequence
  Synthetic primer
aaaaagagggaatggatgca

SEQ ID NO: 447 - DNA, 19 bp, Artificial Sequence
  Synthetic primer
cctgggctcaagtgatcct

SEQ ID NO: 448 - DNA, 19 bp, Artificial Sequence
  Synthetic primer
gctgggattacaggtggga

SEQ ID NO: 449 - DNA, 19 bp, Artificial Sequence
  Synthetic primer
ttgtggctgcaagtgggac

SEQ ID NO: 450 - DNA, 19 bp, Artificial Sequence
  Synthetic primer
cgcgccccacaacaggaaa

SEQ ID NO: 451 - DNA, 17 bp, Artificial Sequence
  Synthetic primer
gcggagcctgggacgcc

SEQ ID NO: 452 - DNA, 17 bp, Artificial Sequence
  Synthetic primer
gcgccgagcccctccgc

SEQ ID NO: 453 - DNA, 20 bp, Artificial Sequence
  Synthetic primer
ctactcagagttgcaacctc

SEQ ID NO: 454 - DNA, 18 bp, Artificial Sequence
  Synthetic primer
cctgcctcagcctcccga

SEQ ID NO: 455 - DNA, 21 bp, Artificial Sequence
  Synthetic primer
gcgtctcttacagtttctcag

SEQ ID NO: 456 - DNA, 20 bp, Artificial Sequence
  Synthetic primer
ccaaagctgagaagtgggac

SEQ ID NO: 457 - DNA, 18 bp, Artificial Sequence
  Synthetic primer
ggggaaccaggagggtgg

SEQ ID NO: 458 - DNA, 21 bp, Artificial Sequence
  Synthetic primer
ttctgtctcaaaaaacaaagc

SEQ ID NO: 459 - DNA, 19 bp, Artificial Sequence
  Synthetic primer
ccttcggaggcagcagaat

SEQ ID NO: 460 - DNA, 21 bp, Artificial Sequence
  Synthetic primer
tttttgagacggagtctcact

SEQ ID NO: 461 - DNA, 19 bp, Artificial Sequence
  Synthetic primer
gacggagtctcactctgtc

SEQ ID NO: 462 - DNA, 19 bp, Artificial Sequence
  Synthetic primer
gctactcagggaggctgag

SEQ ID NO: 463 - DNA, 19 bp, Artificial Sequence
  Synthetic primer
ctcctcactccctgagaca

SEQ ID NO: 464 - DNA, 19 bp, Artificial Sequence
  Synthetic primer
ctgcctcccgggttcaagt

SEQ ID NO: 465 - DNA, 19 bp, Artificial Sequence
  Synthetic primer
cacttgaacccgggaggca

SEQ ID NO: 466 - DNA, 19 bp, Artificial Sequence
  Synthetic primer
cagactggagtgcagtggc

SEQ ID NO: 467 - DNA, 24 bp, Artificial Sequence
  Synthetic primer
tgctaaagatgtgttcttttattt

SEQ ID NO: 468 - DNA, 20 bp, Artificial Sequence
  Synthetic primer
gaagaaacgagggaagaggc

SEQ ID NO: 469 - DNA, 18 bp, Artificial Sequence
  Synthetic primer
cctcctgtgaccagccca

SEQ ID NO: 470 - DNA, 18 bp, Artificial Sequence
  Synthetic primer
ctgcacgtctctcccacc

SEQ ID NO: 471 - DNA, 18 bp, Artificial Sequence
  Synthetic primer
ggtgggagagacgtgcag

SEQ ID NO: 472 - DNA, 20 bp, Artificial Sequence
  Synthetic primer
cgcccggccatcaattcttt

SEQ ID NO: 473 - DNA, 19 bp, Artificial Sequence
  Synthetic primer
ccctcagcctcccaaagtg

SEQ ID NO: 474 - DNA, 21 bp, Artificial Sequence
  Synthetic primer
tgtcatttctcccacttcctt

SEQ ID NO: 475 - DNA, 19 bp, Artificial Sequence
  Synthetic primer
caggaggtgaaggttgcgg

SEQ ID NO: 476 - DNA, 17 bp, Artificial Sequence
  Synthetic primer
gcgcccagcaccacgcc

SEQ ID NO: 477 - DNA, 19 bp, Artificial Sequence
  Synthetic primer
caggagatcaagaccagcc

SEQ ID NO: 478 - DNA, 17 bp, Artificial Sequence
  Synthetic primer
agccactgcccccagcc

SEQ ID NO: 479 - DNA, 20 bp, Artificial Sequence
  Synthetic primer
gtccccaaagtaggaaggac

SEQ ID NO: 480 - DNA, 19 bp, Artificial Sequence
  Synthetic primer
aggtgggaggatcacctga

SEQ ID NO: 481 - DNA, 19 bp, Artificial Sequence
  Synthetic primer
ctccagcctgggtgacaga

SEQ ID NO: 482 - DNA, 18 bp, Artificial Sequence
  Synthetic primer
caggtgagggaagtcccc

SEQ ID NO: 483 - DNA, 19 bp, Artificial Sequence
  Synthetic primer
gactgtgtgtcaaaaaaaa

SEQ ID NO: 484 - DNA, 18 bp, Artificial Sequence
  Synthetic primer
tatcaggcagagccgcgc

SEQ ID NO: 485 - DNA, 20 bp, Artificial Sequence
  Synthetic primer
agagggagaaatgtggcaga

SEQ ID NO: 486 - DNA, 18 bp, Artificial Sequence
  Synthetic primer
gagccactgcacctggcc

SEQ ID NO: 487 - DNA, 18 bp, Artificial Sequence
  Synthetic primer
acaggtgtgagccactgc

SEQ ID NO: 488 - DNA, 19 bp, Artificial Sequence
  Synthetic primer
ggctcaagtgggaggatca

SEQ ID NO: 489 - DNA, 26 bp, Artificial Sequence
  Synthetic primer
ccatcaatcaattttttttttttttt

SEQ ID NO: 490 - DNA, 19 bp, Artificial Sequence
  Synthetic primer
ctaatccctggcctgctca

SEQ ID NO: 491 - DNA, 19 bp, Artificial Sequence
  Synthetic primer
ggaccatagccaactgctc

SEQ ID NO: 492 - DNA, 23 bp, Artificial Sequence
  Synthetic primer
ggtcagagttttcttgactatat

SEQ ID NO: 493 - DNA, 19 bp, Artificial Sequence
  Synthetic primer
gagaccagcctgaccaaca

SEQ ID NO: 494 - DNA, 20 bp, Artificial Sequence
  Synthetic primer
tcatctgaggttgggagttc

SEQ ID NO: 495 - DNA, 26 bp, Artificial Sequence
  Synthetic primer
cggccttttttttttttttttttttt

SEQ ID NO: 496 - DNA, 20 bp, Artificial Sequence
  Synthetic primer
cttgcagtgagcccagatcg

SEQ ID NO: 497 - DNA, 20 bp, Artificial Sequence
  Synthetic primer
cgtgttagccaggatggtct

SEQ ID NO: 498 - DNA, 21 bp, Artificial Sequence
  Synthetic primer
agccttgctttcttgagatac

SEQ ID NO: 499 - DNA, 23 bp, Artificial Sequence
  Synthetic primer
ggtttcttttttagagtgattga

SEQ ID NO: 500 - DNA, 22 bp, Artificial Sequence
  Synthetic primer
gtacataagcaggaggtttctt

SEQ ID NO: 501 - DNA, 21 bp, Artificial Sequence
  Synthetic primer
ctctgtctacctcttaagtga

SEQ ID NO: 502 - DNA, 21 bp, Artificial Sequence
  Synthetic primer
gttcaggaaactgaggttcag

SEQ ID NO: 503 - DNA, 18 bp, Artificial Sequence
  Synthetic primer
caaatgcaggaccccccc

SEQ ID NO: 504 - DNA, 19 bp, Artificial Sequence
  Synthetic primer
tcaagaccagcctggccaa

SEQ ID NO: 505 - DNA, 20 bp, Artificial Sequence
  Synthetic primer
atattggccaggctggtctt

SEQ ID NO: 506 - DNA, 20 bp, Artificial Sequence
  Synthetic primer
cagggtctttctttcccagg

SEQ ID NO: 507 - DNA, 19 bp, Artificial Sequence
  Synthetic primer
cctggcctcaagtgaccct

SEQ ID NO: 508 - DNA, 23 bp, Artificial Sequence
  Synthetic primer
ctggccaacaggttttttttttt

SEQ ID NO: 509 - DNA, 19 bp, Artificial Sequence
  Synthetic primer
cccccacctctgttttcct

SEQ ID NO: 510 - DNA, 19 bp, Artificial Sequence
  Synthetic primer
ctggctcccgtttcagctc

SEQ ID NO: 511 - DNA, 19 bp, Artificial Sequence
  Synthetic primer
cgtccagggaacagaccac

SEQ ID NO: 512 - DNA, 18 bp, Artificial Sequence
  Synthetic primer
ccgagactgggaacagcc

SEQ ID NO: 513 - DNA, 18 bp, Artificial Sequence
  Synthetic primer
ggtctgttccctggacgg

SEQ ID NO: 514 - DNA, 19 bp, Artificial Sequence
  Synthetic primer
aggcctcagtcagtgtgac

SEQ ID NO: 515 - DNA, 19 bp, Artificial Sequence
  Synthetic primer
tcagtgtgaccgcagagga

SEQ ID NO: 516 - DNA, 17 bp, Artificial Sequence
  Synthetic primer
gggttcaggtcacaccc

SEQ ID NO: 517 - DNA, 20 bp, Artificial Sequence
  Synthetic primer
ctctggcttcgtcagaatca

SEQ ID NO: 518 - DNA, 19 bp, Artificial Sequence
  Synthetic primer
ccagcccagccactgggcc

SEQ ID NO: 519 - DNA, 21 bp, Artificial Sequence
  Synthetic primer
cggccagcttatacacaagaa

SEQ ID NO: 520 - DNA, 20 bp, Artificial Sequence
  Synthetic primer
cacctccatgtcatctcatc

SEQ ID NO: 521 - DNA, 19 bp, Artificial Sequence
  Synthetic primer
gtttttccagatggccccc

SEQ ID NO: 522 - DNA, 22 bp, Artificial Sequence
  Synthetic primer
cagagcacattcacggtcacct

SEQ ID NO: 523 - DNA, 17 bp, Artificial Sequence
  Synthetic primer
tcctccccacagccccc

SEQ ID NO: 524 - DNA, 18 bp, Artificial Sequence
  Synthetic primer
gaggaagaggccctgtcc

SEQ ID NO: 525 - DNA, 19 bp, Artificial Sequence
  Synthetic primer
gccatgcagctacacctac

SEQ ID NO: 526 - DNA, 18 bp, Artificial Sequence
  Synthetic primer
cttctgtaagtctgtggg

SEQ ID NO: 527 - DNA, 23 bp, Artificial Sequence
  Synthetic primer
tacctggtgaccttgaatgtgat

SEQ ID NO: 528 - DNA, 21 bp, Artificial Sequence
  Synthetic primer
gagtgcctggcaaaaagatca

SEQ ID NO: 529 - DNA, 21 bp, Artificial Sequence
  Synthetic primer
ccatatagtgcttttgtgccg

SEQ ID NO: 530 - DNA, 20 bp, Artificial Sequence
  Synthetic primer
actcatgtccagacatgacc

SEQ ID NO: 531 - DNA, 20 bp, Artificial Sequence
  Synthetic primer
actgcagtcttgaccttttg

SEQ ID NO: 532 - DNA, 18 bp, Artificial Sequence
  Synthetic primer
tgcgagaccccgtctctg

SEQ ID NO: 533 - DNA, 23 bp, Artificial Sequence
  Synthetic primer
ttttttttccagagacggggtct

SEQ ID NO: 534 - DNA, 18 bp, Artificial Sequence
  Synthetic primer
ccagaacctcagggtatg

SEQ ID NO: 535 - DNA, 19 bp, Artificial Sequence
  Synthetic primer
atcaccgcctacagtgagg

SEQ ID NO: 536 - DNA, 18 bp, Artificial Sequence
  Synthetic primer
agggaggtctgtcgaccc

SEQ ID NO: 537 - DNA, 19 bp, Artificial Sequence
  Synthetic primer
ccaagttccttgtctccct

SEQ ID NO: 538 - DNA, 21 bp, Artificial Sequence
  Synthetic primer
cgaagccccagactctgtgta

SEQ ID NO: 539 - DNA, 17 bp, Artificial Sequence
  Synthetic primer
agtttcctatcccagcc

SEQ ID NO: 540 - DNA, 18 bp, Artificial Sequence
  Synthetic primer
gctttgacaccccccacc

SEQ ID NO: 541 - DNA, 18 bp, Artificial Sequence
  Synthetic primer
cgcgtggatgtcagggcc

SEQ ID NO: 542 - DNA, 19 bp, Artificial Sequence
  Synthetic primer
acccctccgggtcagctcc

SEQ ID NO: 543 - DNA, 20 bp, Artificial Sequence
  Synthetic primer
taataagctggactccgagc

SEQ ID NO: 544 - DNA, 19 bp, Artificial Sequence
  Synthetic primer
atccccaagcgcaactctg

SEQ ID NO: 545 - DNA, 19 bp, Artificial Sequence
  Synthetic primer
cggcctctcaggtaagagc

SEQ ID NO: 546 - DNA, 18 bp, Artificial Sequence
  Synthetic primer
ctctgccctcgcctcgct

SEQ ID NO: 547 - DNA, 20 bp, Artificial Sequence
  Synthetic primer
gtggaccatggtgcacagca

SEQ ID NO: 548 - DNA, 19 bp, Artificial Sequence
  Synthetic primer
ctgtgcaccatggtccacg

SEQ ID NO: 549 - DNA, 19 bp, Artificial Sequence
  Synthetic primer
tgttcccgctccacccaga

SEQ ID NO: 550 - DNA, 17 bp, Artificial Sequence
  Synthetic primer
cagccttgcgtcccggc

SEQ ID NO: 551 - DNA, 19 bp, Artificial Sequence
  Synthetic primer
gggacgtggtagcagagag

SEQ ID NO: 552 - DNA, 19 bp, Artificial Sequence
  Synthetic primer
aacccaggcgtcccgcgtc

SEQ ID NO: 553 - DNA, 19 bp, Artificial Sequence
  Synthetic primer
tgggttctttccctggctg

SEQ ID NO: 554 - DNA, 19 bp, Artificial Sequence
  Synthetic primer
ttgcagcaccaactgccct

SEQ ID NO: 555 - DNA, 21 bp, Artificial Sequence
  Synthetic primer
agagtccgcagctctttgaac

SEQ ID NO: 556 - DNA, 23 bp, Artificial Sequence
  Synthetic primer
tgcactatcttatcgtattatca

SEQ ID NO: 557 - DNA, 18 bp, Artificial Sequence
  Synthetic primer
ccctccgtgccttgagga

SEQ ID NO: 558 - DNA, 19 bp, Artificial Sequence
  Synthetic primer
cccagggtgacgttgcaga

SEQ ID NO: 559 - DNA, 20 bp, Artificial Sequence
  Synthetic primer
tcagtaccggaacaggcgtg

SEQ ID NO: 560 - DNA, 19 bp, Artificial Sequence
  Synthetic primer
agtaacctgcgcagctggg

SEQ ID NO: 561 - DNA, 18 bp, Artificial Sequence
  Synthetic primer
tccaaggacccgcctgct

SEQ ID NO: 562 - DNA, 22 bp, Artificial Sequence
  Synthetic primer
cttgaaccagatagaaatgcac

SEQ ID NO: 563 - DNA, 21 bp, Artificial Sequence
  Synthetic primer
cagaccttgaaccagatagaa

SEQ ID NO: 564 - DNA, 19 bp, Artificial Sequence
  Synthetic primer
accagtggcgcctttttcg

SEQ ID NO: 565 - DNA, 19 bp, Artificial Sequence
  Synthetic primer
ctcccagacagagtgcatg

SEQ ID NO: 566 - DNA, 18 bp, Artificial Sequence
  Synthetic primer
gcaccagcgctggacagc

SEQ ID NO: 567 - DNA, 21 bp, Artificial Sequence
  Synthetic primer
gcagcagcaccccctcagtgg

SEQ ID NO: 568 - DNA, 18 bp, Artificial Sequence
  Synthetic primer
ctccggtggcgctgcaaa

SEQ ID NO: 569 - DNA, 17 bp, Artificial Sequence
  Synthetic primer
ggaccacaggcgcccac

SEQ ID NO: 570 - DNA, 19 bp, Artificial Sequence
  Synthetic primer
ctccttccccgacaatcag

SEQ ID NO: 571 - DNA, 18 bp, Artificial Sequence
  Synthetic primer
cacgttgacctgccgcgc

SEQ ID NO: 572 - DNA, 18 bp, Artificial Sequence
  Synthetic primer
ggccgatgttgagggccc

SEQ ID NO: 573 - DNA, 18 bp, Artificial Sequence
  Synthetic primer
ggcgagtacgagtgcgca

SEQ ID NO: 574 - DNA, 18 bp, Artificial Sequence
  Synthetic primer
acggtgcgcgtggccggt

SEQ ID NO: 575 - DNA, 18 bp, Artificial Sequence
  Synthetic primer
cctctccccagctgccac

SEQ ID NO: 576 - DNA, 17 bp, Artificial Sequence
  Synthetic primer
ctccctctcggtcccgg

SEQ ID NO: 577 - DNA, 17 bp, Artificial Sequence
  Synthetic primer
cggtcccggtagactag

SEQ ID NO: 578 - DNA, 17 bp, Artificial Sequence
  Synthetic primer
ttctactctgtcccact

SEQ ID NO: 579 - DNA, 20 bp, Artificial Sequence
  Synthetic primer
ctagacggaagtgggacaga

SEQ ID NO: 580 - DNA, 21 bp, Artificial Sequence
  Synthetic primer
tgtgaattgggtcaagtttcc

SEQ ID NO: 581 - DNA, 18 bp, Artificial Sequence
  Synthetic primer
gacccctctctccctcca

SEQ ID NO: 582 - DNA, 18 bp, Artificial Sequence
  Synthetic primer
aggcgaggccgtgtgtct

SEQ ID NO: 583 - DNA, 20 bp, Artificial Sequence
  Synthetic primer
ggcgtcacccccattttcta

SEQ ID NO: 584 - DNA, 21 bp, Artificial Sequence
  Synthetic primer
tttctacccatcccctcaata

SEQ ID NO: 585 - DNA, 21 bp, Artificial Sequence
  Synthetic primer
gtttctgcaaggtggaacaag

SEQ ID NO: 586 - DNA, 20 bp, Artificial Sequence
  Synthetic primer
ggccctctcaaaaatcgctt

SEQ ID NO: 587 - DNA, 18 bp, Artificial Sequence
  Synthetic primer
agctgggcatggtggtgc

SEQ ID NO: 588 - DNA, 22 bp, Artificial Sequence
  Synthetic primer
aaaccccgtctctactaaaaat

SEQ ID NO: 589 - DNA, 18 bp, Artificial Sequence
  Synthetic primer
gccagggccgagcacagt

SEQ ID NO: 590 - DNA, 20 bp, Artificial Sequence
  Synthetic primer
atggtgaaaccccgtcacta

SEQ ID NO: 591 - DNA, 19 bp, Artificial Sequence
  Synthetic primer
tgggctggagcacaatgac

SEQ ID NO: 592 - DNA, 18 bp, Artificial Sequence
  Synthetic primer
ggagtgtccctggacccc

SEQ ID NO: 593 - DNA, 18 bp, Artificial Sequence
  Synthetic primer
ggtccacaccgacgccag

SEQ ID NO: 594 - DNA, 19 bp, Artificial Sequence
  Synthetic primer
cccctgcccaggacacccc

SEQ ID NO: 595 - DNA, 20 bp, Artificial Sequence
  Synthetic primer
ccccagcaaagagaggtcat

SEQ ID NO: 596 - DNA, 21 bp, Artificial Sequence
  Synthetic primer
ggaaggagcggaattcaccct

SEQ ID NO: 597 - DNA, 18 bp, Artificial Sequence
  Synthetic primer
tcagcttcctccctcccc

SEQ ID NO: 598 - DNA, 20 bp, Artificial Sequence
  Synthetic primer
attacaggcatgagccactg

SEQ ID NO: 599 - DNA, 20 bp, Artificial Sequence
  Synthetic primer
agacgtgaagagacacacct

SEQ ID NO: 600 - DNA, 22 bp, Artificial Sequence
  Synthetic primer
aagagacacacctaatttgtgg

SEQ ID NO: 601 - DNA, 18 bp, Artificial Sequence
  Synthetic primer
gcccgcgtcctcctctcc

SEQ ID NO: 602 - DNA, 19 bp, Artificial Sequence
  Synthetic primer
gcgtgagtgccagggttct

SEQ ID NO: 603 - DNA, 19 bp, Artificial Sequence
  Synthetic primer
acaatgtccgactcccaca

SEQ ID NO: 604 - DNA, 21 bp, Artificial Sequence
  Synthetic primer
ctttgtatacaatcttccctc

SEQ ID NO: 605 - DNA, 17 bp, Artificial Sequence
  Synthetic primer
ataccatgccaggcatt

SEQ ID NO: 606 - DNA, 18 bp, Artificial Sequence
  Synthetic primer
gagctgggaccacaggca

SEQ ID NO: 607 - DNA, 18 bp, Artificial Sequence
  Synthetic primer
ccagctcactcctccccc

SEQ ID NO: 608 - DNA, 20 bp, Artificial Sequence
  Synthetic primer
taggtgtgcgtgtgtgtgtg

SEQ ID NO: 609 - DNA, 18 bp, Artificial Sequence
  Synthetic primer
gcccaccctccattcagc

SEQ ID NO: 610 - DNA, 20 bp, Artificial Sequence
  Synthetic primer
ctggggaactacaggaatgc

SEQ ID NO: 611 - DNA, 22 bp, Artificial Sequence
  Synthetic primer
actgtctctctgtttttgagat

SEQ ID NO: 612 - DNA, 20 bp, Artificial Sequence
  Synthetic primer
tcggctgcccgtgccaagtc

SEQ ID NO: 613 - DNA, 20 bp, Artificial Sequence
  Synthetic primer
gagtccttcttcatgtactc

SEQ ID NO: 614 - DNA, 19 bp, Artificial Sequence
  Synthetic primer
gcagctgcaccgacagttc

SEQ ID NO: 615 - DNA, 17 bp, Artificial Sequence
  Synthetic primer
actccctgccctggccc

SEQ ID NO: 616 - DNA, 18 bp, Artificial Sequence
  Synthetic primer
gctgggattataagcgtg

SEQ ID NO: 617 - DNA, 17 bp, Artificial Sequence
  Synthetic primer
taccacagggtggcggg

SEQ ID NO: 618 - DNA, 21 bp, Artificial Sequence
  Synthetic primer
gttaccatgttagggaggaga

SEQ ID NO: 619 - DNA, 20 bp, Artificial Sequence
  Synthetic primer
ggacattgagggtgagctaa

SEQ ID NO: 620 - DNA, 17 bp, Artificial Sequence
  Synthetic primer
caggagggtgcccggga

SEQ ID NO: 621 - DNA, 18 bp, Artificial Sequence
  Synthetic primer
actgggtcacccttcttc

SEQ ID NO: 622 - DNA, 18 bp, Artificial Sequence
  Synthetic primer
tgcgctgccaagtggagg

SEQ ID NO: 623 - DNA, 21 bp, Artificial Sequence
  Synthetic primer
gctcacagttctcggcaggac

SEQ ID NO: 624 - DNA, 24 bp, Artificial Sequence
  Synthetic primer
cttccatcctcatttttttttatt

SEQ ID NO: 625 - DNA, 17 bp, Artificial Sequence
  Synthetic primer
cggggtgggtggatcaa

SEQ ID NO: 626 - DNA, 23 bp, Artificial Sequence
  Synthetic primer
catttgtgtgtgagatacaaaga

SEQ ID NO: 627 - DNA, 20 bp, Artificial Sequence
  Synthetic primer
atcaccgtgtacagtgagtc

SEQ ID NO: 628 - DNA, 22 bp, Artificial Sequence
  Synthetic primer
gctcagtgtactgcaatggctc

SEQ ID NO: 629 - DNA, 20 bp, Artificial Sequence
  Synthetic primer
tgttgatgcgtgggttgggg

SEQ ID NO: 630 - DNA, 17 bp, Artificial Sequence
  Synthetic primer
tggattctacctttccc

SEQ ID NO: 631 - DNA, 17 bp, Artificial Sequence
  Synthetic primer
tccttctgagttctccc

SEQ ID NO: 632 - DNA, 20 bp, Artificial Sequence
  Synthetic primer
ccttcctctgtcagaatggc

SEQ ID NO: 633 - DNA, 20 bp, Artificial Sequence
  Synthetic primer
ggtgatttggggacagctga

SEQ ID NO: 634 - DNA, 30 bp, Artificial Sequence
  Synthetic primer
acgttggatgagggttgcagagcaggagaa

SEQ ID NO: 635 - DNA, 30 bp, Artificial Sequence
  Synthetic primer
acgttggatgagccaaggtgacgctgaatg

SEQ ID NO: 636 - DNA, 30 bp, Artificial Sequence
  Synthetic primer
acgttggatgagatggtgacagtaacctgc

SEQ ID NO: 637 - DNA, 30 bp, Artificial Sequence
  Synthetic primer
acgttggatgtggcatttagctgaagctgg

SEQ ID NO: 638 - DNA, 30 bp, Artificial Sequence; identical to SEQ ID NO: 302
  Synthetic primer

SEQ ID NO: 639 - DNA, 30 bp, Artificial Sequence
  Synthetic primer
acgttggatgttagacgaaaaaggcgccac

SEQ ID NO: 640 - DNA, 30 bp, Artificial Sequence
  Synthetic primer
acgttggatgaacctctggtcccccagtgc

SEQ ID NO: 641 - DNA, 30 bp, Artificial Sequence; identical to SEQ ID NO: 197
  Synthetic primer

SEQ ID NO: 642 - DNA, 29 bp, Artificial Sequence
  Synthetic primer
acgttggatgaagctgaggccacagggag

SEQ ID NO: 643 - DNA, 30 bp, Artificial Sequence
  Synthetic primer
acgttggatgagagggaatggatgcagaag

SEQ ID NO: 644 - DNA, 30 bp, Artificial Sequence; identical to SEQ ID NO: 88
  Synthetic primer

SEQ ID NO: 645 - DNA, 30 bp, Artificial Sequence; identical to SEQ ID NO: 87
  Synthetic primer

SEQ ID NO: 646 - DNA, 29 bp, Artificial Sequence
  Synthetic primer
acgttggatggctcgctggcactttcgtc

SEQ ID NO: 647 - DNA, 30 bp, Artificial Sequence
  Synthetic primer
acgttggatggagccatacctctaagcacc

SEQ ID NO: 648 - DNA, 30 bp, Artificial Sequence; identical to SEQ ID NO: 152
  Synthetic primer

SEQ ID NO: 649 - DNA, 30 bp, Artificial Sequence
  Synthetic primer
acgttggatggccttcagctatctaatccc

SEQ ID NO: 650 - DNA, 30 bp, Artificial Sequence
  Synthetic primer
acgttggatgtacgcgatctggtcgctctg

SEQ ID NO: 651 - DNA, 30 bp, Artificial Sequence
  Synthetic primer
acgttggatgttcaggccccaccttctgtt

SEQ ID NO: 652 - DNA, 30 bp, Artificial Sequence
  Synthetic primer
acgttggatgactcacagagcacattcacg

SEQ ID NO: 653 - DNA, 30 bp, Artificial Sequence; identical to SEQ ID NO: 216
  Synthetic primer

SEQ ID NO: 654 - DNA, 30 bp, Artificial Sequence
  Synthetic primer
acgttggatggtgtctactcagcgtgtgtg

SEQ ID NO: 655 - DNA, 30 bp, Artificial Sequence; identical to SEQ ID NO: 253
  Synthetic primer

SEQ ID NO: 656 - DNA, 30 bp, Artificial Sequence; identical to SEQ ID NO: 297
  Synthetic primer

SEQ ID NO: 657 - DNA, 30 bp, Artificial Sequence
  Synthetic primer
acgttggatggtcaaggacgtaacgctaac

SEQ ID NO: 658 - DNA, 30 bp, Artificial Sequence
  Synthetic primer
acgttggatgacttcctcccccaagaaaac

SEQ ID NO: 659 - DNA, 30 bp, Artificial Sequence; identical to SEQ ID NO: 239
  Synthetic primer

SEQ ID NO: 660 - DNA, 30 bp, Artificial Sequence
  Synthetic primer
acgttggatgagacccagtgtctctcctgt

SEQ ID NO: 661 - DNA, 30 bp, Artificial Sequence; identical to SEQ ID NO: 265
  Synthetic primer

SEQ ID NO: 662 - DNA, 30 bp, Artificial Sequence
  Synthetic primer
acgttggatgtagatggtcacgttctcccg

SEQ ID NO: 663 - DNA, 30 bp, Artificial Sequence
  Synthetic primer
acgttggatgacagctagcgcagagcagga

SEQ ID NO: 664 - DNA, 23 bp, Artificial Sequence
  Synthetic primer
ccttcagcaggagctgggccctc

SEQ ID NO: 665 - DNA, 17 bp, Artificial Sequence
  Synthetic primer
taacctgcgcagctggg

SEQ ID NO: 666 - DNA, 20 bp, Artificial Sequence
  Synthetic primer
gaggtgtcacgctagtcgag

SEQ ID NO: 667 - DNA, 20 bp, Artificial Sequence
  Synthetic primer
ctccgagactgggaacagcc

SEQ ID NO: 668 - DNA, 17 bp, Artificial Sequence
  Synthetic primer
aggggcgactccacgga

SEQ ID NO: 669 - DNA, 17 bp, Artificial Sequence
  Synthetic primer
ctgagtccggatcagaa

SEQ ID NO: 670 - DNA, 23 bp, Artificial Sequence
  Synthetic primer
gtcccgccccctccgtcgcgtgc

SEQ ID NO: 671 - DNA, 17 bp, Artificial Sequence
  Synthetic primer
ggagtcatggagggttt

SEQ ID NO: 672 - DNA, 17 bp, Artificial Sequence
  Synthetic primer
tccgcagctctttgaac

SEQ ID NO: 673 - DNA, 17 bp, Artificial Sequence
  Synthetic primer
cacattcacggtcacct

SEQ ID NO: 674 - DNA, 19 bp, Artificial Sequence
  Synthetic primer
ccttctgctcggtgggtgg

SEQ ID NO: 675 - DNA, 18 bp, Artificial Sequence
  Synthetic primer
accttgaaccagatagaa

SEQ ID NO: 676 - DNA, 19 bp, Artificial Sequence
  Synthetic primer
aaacattgtgggttgatgg

SEQ ID NO: 677 - DNA, 20 bp, Artificial Sequence
  Synthetic primer
cccgggtacctccttacgct

SEQ ID NO: 678 - DNA, 20 bp, Artificial Sequence
  Synthetic primer
ccccagggtgacgttgcaga

SEQ ID NO: 679 - DNA, 30 bp, Artificial Sequence
  Synthetic primer
acgttggatgttatatagccttcttttctc

SEQ ID NO: 680 - DNA, 30 bp, Artificial Sequence
  Synthetic primer
acgttggatgttcactgctaacatgcatgg

SEQ ID NO: 681 - DNA, 30 bp, Artificial Sequence
  Synthetic primer
acgttggatggagcccaatacaatcaggtg

SEQ ID NO: 682 - DNA, 30 bp, Artificial Sequence
  Synthetic primer
acgttggatggccctgaagtttttgaatgg

SEQ ID NO: 683 - DNA, 30 bp, Artificial Sequence
  Synthetic primer
acgttggatgcattttatgagaagatgcac

SEQ ID NO: 684 - DNA, 30 bp, Artificial Sequence
  Synthetic primer
acgttggatgagactgtagcctaaatgagg

SEQ ID NO: 685 - DNA, 30 bp, Artificial Sequence
  Synthetic primer
acgttggatgctgtgtgatttggacaaccc

SEQ ID NO: 686 - DNA, 30 bp, Artificial Sequence
  Synthetic primer
acgttggatgggataggaaacatattaagg

SEQ ID NO: 687 - DNA, 30 bp, Artificial Sequence
  Synthetic primer
acgttggatgagaggtcatcttaatgggcc

SEQ ID NO: 688 - DNA, 30 bp, Artificial Sequence
  Synthetic primer
acgttggatgtactgcagagctctcccttg

SEQ ID NO: 689 - DNA, 30 bp, Artificial Sequence
  Synthetic primer
acgttggatgtaagccagtaacacatgccg

SEQ ID NO: 690 - DNA, 30 bp, Artificial Sequence
  Synthetic primer
acgttggatgctttcctgctgcatttagtg

SEQ ID NO: 691 - DNA, 30 bp, Artificial Sequence
  Synthetic primer
acgttggatgggtgaagcttgaaagcaagc

SEQ ID NO: 692 - DNA, 35 bp, Artificial Sequence
  Synthetic primer
acgttggatgttcaagaattattttattgcaagtc

SEQ ID NO: 693 - DNA, 30 bp, Artificial Sequence
  Synthetic primer
acgttggatggctttgaattactctgtccc

SEQ ID NO: 694 - DNA, 30 bp, Artificial Sequence
  Synthetic primer
acgttggatgtcccagtacctaagtagcag

SEQ ID NO: 695 - DNA, 30 bp, Artificial Sequence; identical to SEQ ID NO: 693
  Synthetic primer

SEQ ID NO: 696 - DNA, 30 bp, Artificial Sequence; identical to SEQ ID NO: 694
  Synthetic primer

SEQ ID NO: 697 - DNA, 30 bp, Artificial Sequence
  Synthetic primer
acgttggatgtgtactgctttcatccttgc

SEQ ID NO: 698 - DNA, 30 bp, Artificial Sequence
  Synthetic primer
acgttggatgactggttgataccataggac

SEQ ID NO: 699 - DNA, 30 bp, Artificial Sequence
  Synthetic primer
acgttggatggtagagctgacatcataggc

SEQ ID NO: 700 - DNA, 30 bp, Artificial Sequence
  Synthetic primer
acgttggatgcctactgtgttagcctcact

SEQ ID NO: 701 - DNA, 30 bp, Artificial Sequence
  Synthetic primer
acgttggatgacaactacgtgtaactgtcc

SEQ ID NO: 702 - DNA, 31 bp, Artificial Sequence
  Synthetic primer
acgttggatgccaatacctttaacacccaac

SEQ ID NO: 703 - DNA, 30 bp, Artificial Sequence
  Synthetic primer
acgttggatgaacacacttagtacccacgc

SEQ ID NO: 704 - DNA, 30 bp, Artificial Sequence
  Synthetic primer
acgttggatgcaaggcaaaatgtttccagc

SEQ ID NO: 705 - DNA, 30 bp, Artificial Sequence
  Synthetic primer
acgttggatgaagcaccatttgtggctcag

SEQ ID NO: 706 - DNA, 30 bp, Artificial Sequence
  Synthetic primer
acgttggatgcttcaagaggccatacagac

SEQ ID NO: 707 - DNA, 30 bp, Artificial Sequence
  Synthetic primer
acgttggatggaaggataagccacagtgag

SEQ ID NO: 708 - DNA, 30 bp, Artificial Sequence
  Synthetic primer
acgttggatggatgccaatttggtttgccc

SEQ ID NO: 709 - DNA, 30 bp, Artificial Sequence
  Synthetic primer
acgttggatgaatggcatgggaacttggac

SEQ ID NO: 710 - DNA, 30 bp, Artificial Sequence
  Synthetic primer
acgttggatgtgcaccacactgaagtgatc

SEQ ID NO: 711 - DNA, 30 bp, Artificial Sequence
  Synthetic primer
acgttggatgatacgcaggttgtagagagg

SEQ ID NO: 712 - DNA, 30 bp, Artificial Sequence
  Synthetic primer
acgttggatgtgaatcatggttgcctcctg

SEQ ID NO: 713 - DNA, 30 bp, Artificial Sequence
  Synthetic primer
acgttggatgctggagaacaaaagaccacc

SEQ ID NO: 714 - DNA, 30 bp, Artificial Sequence
  Synthetic primer
acgttggatggtgatgaaaaccatgtgagc

SEQ ID NO: 715 - DNA, 30 bp, Artificial Sequence
  Synthetic primer
acgttggatggaatgatgtaaacgttggag

SEQ ID NO: 716 - DNA, 30 bp, Artificial Sequence
  Synthetic primer
acgttggatgaccagcactattacccatgc

SEQ ID NO: 717 - DNA, 30 bp, Artificial Sequence
  Synthetic primer
acgttggatggtcagcaaatctgccttcac

SEQ ID NO: 718 - DNA, 30 bp, Artificial Sequence
  Synthetic primer
acgttggatgaacctgctttgtggtcttcg

SEQ ID NO: 719 - DNA, 30 bp, Artificial Sequence
  Synthetic primer
acgttggatggtatttaaattagtggtgtg

SEQ ID NO: 720 - DNA, 30 bp, Artificial Sequence
  Synthetic primer
acgttggatgaagaacattgaaagaagcag

SEQ ID NO: 721 - DNA, 30 bp, Artificial Sequence
  Synthetic primer
acgttggatgagcagggttaaatttcccag

SEQ ID NO: 722 - DNA, 30 bp, Artificial Sequence
  Synthetic primer
acgttggatgtcatgtagctaaacaaaggc

SEQ ID NO: 723 - DNA, 31 bp, Artificial Sequence
  Synthetic primer
acgttggatggtgaccatgtagaaatctgtg

SEQ ID NO: 724 - DNA, 30 bp, Artificial Sequence
  Synthetic primer
acgttggatgtacaactagtatctacagac

SEQ ID NO: 725 - DNA, 30 bp, Artificial Sequence
  Synthetic primer
acgttggatgcttgggaaataacaggtgac

SEQ ID NO: 726 - DNA, 31 bp, Artificial Sequence
  Synthetic primer
acgttggatgcacttgtctgtcttaacacac

SEQ ID NO: 727 - DNA, 30 bp, Artificial Sequence
  Synthetic primer
acgttggatgttgggaaggtactaacagcg

SEQ ID NO: 728 - DNA, 30 bp, Artificial Sequence
  Synthetic primer
acgttggatgtcgtacctgcataagtggtg

SEQ ID NO: 729 - DNA, 30 bp, Artificial Sequence
  Synthetic primer
acgttggatgtcaagcaatagagaccacag

SEQ ID NO: 730 - DNA, 30 bp, Artificial Sequence
  Synthetic primer
acgttggatgtaatctcagaatggcagcac

SEQ ID NO: 731 - DNA, 30 bp, Artificial Sequence
  Synthetic primer
acgttggatgcctgtggtctctattgcttg

SEQ ID NO: 732 - DNA, 30 bp, Artificial Sequence
  Synthetic primer
acgttggatgtgccagtgctctgaaaactg

SEQ ID NO: 733 - DNA, 30 bp, Artificial Sequence
  Synthetic primer
acgttggatgactcacactgtggtttgggg

SEQ ID NO: 734 - DNA, 30 bp, Artificial Sequence
  Synthetic primer
acgttggatgcatactctgccaaagtttta

SEQ ID NO: 735 - DNA, 30 bp, Artificial Sequence
  Synthetic primer
acgttggatgctctcctactctttactgtc

SEQ ID NO: 736 - DNA, 30 bp, Artificial Sequence
  Synthetic primer
acgttggatggtgggtaacagttttcaggc

SEQ ID NO: 737 - DNA, 30 bp, Artificial Sequence
  Synthetic primer
acgttggatggccaaaccattttgtgcctg

SEQ ID NO: 738 - DNA, 31 bp, Artificial Sequence
  Synthetic primer
acgttggatgcacctgtataccaatttgtag

SEQ ID NO: 739 - DNA, 30 bp, Artificial Sequence
  Synthetic primer
acgttggatgcagatgggtttatgtcagag

SEQ ID NO: 740 - DNA, 30 bp, Artificial Sequence
  Synthetic primer
acgttggatgggctctaccaagacataatg

SEQ ID NO: 741 - DNA, 30 bp, Artificial Sequence
  Synthetic primer
acgttggatgcccagtgcattatgtcttgg

SEQ ID NO: 742 - DNA, 30 bp, Artificial Sequence
  Synthetic primer
acgttggatgatccgcatgtgtctgtattc

SEQ ID NO: 743 - DNA, 30 bp, Artificial Sequence
  Synthetic primer
acgttggatgtgttatgcgggagtataagg

SEQ ID NO: 744 - DNA, 30 bp, Artificial Sequence
  Synthetic primer
acgttggatggcaactcagctagcctttac

SEQ ID NO: 745 - DNA, 30 bp, Artificial Sequence
  Synthetic primer
acgttggatgattgtttccagggtgctctg

SEQ ID NO: 746 - DNA, 30 bp, Artificial Sequence
  Synthetic primer
acgttggatggagttgccagtagctttgag

SEQ ID NO: 747 - DNA, 30 bp, Artificial Sequence
  Synthetic primer
acgttggatgctccaggagcaaggattatg

SEQ ID NO: 748 - DNA, 30 bp, Artificial Sequence
  Synthetic primer
acgttggatgatagtgttatcacatagacc

SEQ ID NO: 749 - DNA, 30 bp, Artificial Sequence
  Synthetic primer
acgttggatgaatgatatgcaccgatcttc

SEQ ID NO: 750 - DNA, 30 bp, Artificial Sequence
  Synthetic primer
acgttggatgccaggcaaaaagaatgaccg

SEQ ID NO: 751 - DNA, 30 bp, Artificial Sequence
  Synthetic primer
acgttggatgaagtttccctggtcgtgatc

SEQ ID NO: 752 - DNA, 31 bp, Artificial Sequence
  Synthetic primer
acgttggatggaacatgaaaaattcataagc

SEQ ID NO: 753 - DNA, 31 bp, Artificial Sequence
  Synthetic primer
acgttggatgcttaaatgtctctagaaaagg

SEQ ID NO: 754 - DNA, 30 bp, Artificial Sequence
  Synthetic primer
acgttggatgtatacattgtcctgatagag

SEQ ID NO: 755 - DNA, 30 bp, Artificial Sequence
  Synthetic primer
acgttggatgctgaggagtccatcatagtg

SEQ ID NO: 756 - DNA, 30 bp, Artificial Sequence
  Synthetic primer
acgttggatgctgtttttcacccccgattc

SEQ ID NO: 757 - DNA, 31 bp, Artificial Sequence
  Synthetic primer
acgttggatggataagtattggcttaatctg

SEQ ID NO: 758 - DNA, 30 bp, Artificial Sequence
  Synthetic primer
acgttggatgtttcattgctcatggattag

SEQ ID NO: 759 - DNA, 31 bp, Artificial Sequence
  Synthetic primer
acgttggatggcttctgattttatatggcac

SEQ ID NO: 760 - DNA, 30 bp, Artificial Sequence
  Synthetic primer
acgttggatggaaacaagcagatgtcatgg

SEQ ID NO: 761 - DNA, 30 bp, Artificial Sequence
  Synthetic primer
acgttggatgataaatgcctccttgcctgc

SEQ ID NO: 762 - DNA, 31 bp, Artificial Sequence
  Synthetic primer
acgttggatggaactcctgtttattgcctac

SEQ ID NO: 763 - DNA, 30 bp, Artificial Sequence
  Synthetic primer
acgttggatgtctcacattgactggacaac

SEQ ID NO: 764 - DNA, 30 bp, Artificial Sequence
  Synthetic primer
acgttggatgccaagcagtttgcgaaaatc

SEQ ID NO: 765 - DNA, 30 bp, Artificial Sequence
  Synthetic primer
acgttggatgatgctgaacaacaggatggg

SEQ ID NO: 766 - DNA, 30 bp, Artificial Sequence
  Synthetic primer
acgttggatggggagagaatggttgcatat

SEQ ID NO: 767 - DNA, 30 bp, Artificial Sequence
  Synthetic primer
acgttggatgctgtgccttgcacatagtag

SEQ ID NO: 768 - DNA, 30 bp, Artificial Sequence
  Synthetic primer
acgttggatggctgagggagaaattgagtg

SEQ ID NO: 769 - DNA, 30 bp, Artificial Sequence
  Synthetic primer
acgttggatggtcctactagtccctgtatg

SEQ ID NO: 770 - DNA, 30 bp, Artificial Sequence
  Synthetic primer
acgttggatggcactacatgggacacaaag

SEQ ID NO: 771 - DNA, 30 bp, Artificial Sequence
  Synthetic primer
acgttggatgcccatttttgctagcaggag

SEQ ID NO: 772 - DNA, 30 bp, Artificial Sequence
  Synthetic primer
acgttggatgcctaagacctatgctctcac

SEQ ID NO: 773 - DNA, 31 bp, Artificial Sequence
  Synthetic primer
acgttggatgctgattattctgatggtaatg

SEQ ID NO: 774 - DNA, 31 bp, Artificial Sequence
  Synthetic primer
acgttggatggcccatgttaacattttcttc

SEQ ID NO: 775 - DNA, 30 bp, Artificial Sequence
  Synthetic primer
acgttggatgctctctgctaattacaaggc

SEQ ID NO: 776 - DNA, 30 bp, Artificial Sequence
  Synthetic primer
acgttggatgtacgttttgatggggttgag

SEQ ID NO: 777 - DNA, 30 bp, Artificial Sequence
  Synthetic primer
acgttggatgagatacctatttgtgccagg

SEQ ID NO: 778 - DNA, 30 bp, Artificial Sequence; identical to SEQ ID NO: 776
  Synthetic primer

SEQ ID NO: 779 - DNA, 30 bp, Artificial Sequence
  Synthetic primer
acgttggatgtgtcttttcatgccgaaagc

SEQ ID NO: 780 - DNA, 30 bp, Artificial Sequence
  Synthetic primer
acgttggatgcgacaaacactgacaatcag

SEQ ID NO: 781 - DNA, 30 bp, Artificial Sequence
  Synthetic primer
acgttggatggactgctattctcttagacc

SEQ ID NO: 782 - DNA, 30 bp, Artificial Sequence
  Synthetic primer
acgttggatgcattcttgagcaaatgtgac

SEQ ID NO: 783 - DNA, 30 bp, Artificial Sequence
  Synthetic primer
acgttggatggtcatatatctgaggtggag

SEQ ID NO: 784 - DNA, 30 bp, Artificial Sequence
  Synthetic primer
acgttggatgcaaggtattctcgtgcattg

SEQ ID NO: 785 - DNA, 30 bp, Artificial Sequence; identical to SEQ ID NO: 783
  Synthetic primer

SEQ ID NO: 786 - DNA, 30 bp, Artificial Sequence; identical to SEQ ID NO: 784
  Synthetic primer

SEQ ID NO: 787 - DNA, 30 bp, Artificial Sequence
  Synthetic primer
acgttggatgcgaaataaatgagggcaagg

SEQ ID NO: 788 - DNA, 30 bp, Artificial Sequence
  Synthetic primer
acgttggatgggaggctgccgaataaaaac

SEQ ID NO: 789 - DNA, 30 bp, Artificial Sequence
  Synthetic primer
acgttggatgtgggtcagcagcaaatattg

SEQ ID NO: 790 - DNA, 30 bp, Artificial Sequence
  Synthetic primer
acgttggatgtgccctcatttatttcggtg

SEQ ID NO: 791 - DNA, 30 bp, Artificial Sequence; identical to SEQ ID NO: 789
  Synthetic primer

SEQ ID NO: 792 - DNA, 30 bp, Artificial Sequence; identical to SEQ ID NO: 790
  Synthetic primer

SEQ ID NO: 793 - DNA, 30 bp, Artificial Sequence
  Synthetic primer
acgttggatggtgaatgaaggaaaagtagc

SEQ ID NO: 794 - DNA, 31 bp, Artificial Sequence
  Synthetic primer
acgttggatgcacgcctaagcaattaatgac

SEQ ID NO: 795 - DNA, 30 bp, Artificial Sequence
  Synthetic primer
acgttggatgacacttgattacaatggccc

SEQ ID NO: 796 - DNA, 30 bp, Artificial Sequence
  Synthetic primer
acgttggatggcatggttctgttataaggc

SEQ ID NO: 797 - DNA, 30 bp, Artificial Sequence
  Synthetic primer
acgttggatgctgtcatgattcaagctacc

SEQ ID NO: 798 - DNA, 30 bp, Artificial Sequence
  Synthetic primer
acgttggatgtttggctcatgaacagcacc

SEQ ID NO: 799 - DNA, 30 bp, Artificial Sequence
  Synthetic primer
acgttggatgctgcaaagtatctggctatg

SEQ ID NO: 800 - DNA, 30 bp, Artificial Sequence
  Synthetic primer
acgttggatggctccgtgagtagttatttc

SEQ ID NO: 801 - DNA, 30 bp, Artificial Sequence
  Synthetic primer
acgttggatgtaaatttgcagaggccgtcg

SEQ ID NO: 802 - DNA, 30 bp, Artificial Sequence
  Synthetic primer
acgttggatgcaagagggctgctttaaacc

SEQ ID NO: 803 - DNA, 30 bp, Artificial Sequence
  Synthetic primer
acgttggatgcatccttgatccaccctttg

SEQ ID NO: 804 - DNA, 30 bp, Artificial Sequence
  Synthetic primer
acgttggatgcatgtcgtcagaagtgacaa

SEQ ID NO: 805 - DNA, 30 bp, Artificial Sequence
  Synthetic primer
acgttggatgatggcacagtttagcatgtc

SEQ ID NO: 806 - DNA, 30 bp, Artificial Sequence
  Synthetic primer
acgttggatgatactgagctccattttggg

SEQ ID NO: 807 - DNA, 30 bp, Artificial Sequence
  Synthetic primer
acgttggatgattggaaggaggaagcatag

SEQ ID NO: 808 - DNA, 30 bp, Artificial Sequence
  Synthetic primer
acgttggatgggaattgaaattggcattgc

SEQ ID NO: 809 - DNA, 30 bp, Artificial Sequence
  Synthetic primer
acgttggatgtagcttctaaacatctcttg

SEQ ID NO: 810 - DNA, 30 bp, Artificial Sequence
  Synthetic primer
acgttggatggcaggaggatagatctgtag

SEQ ID NO: 811 - DNA, 30 bp, Artificial Sequence
  Synthetic primer
acgttggatgcacattgctccctcctttac

SEQ ID NO: 812 - DNA, 30 bp, Artificial Sequence
  Synthetic primer
acgttggatggcggccgaagagtactattt

SEQ ID NO: 813 - DNA, 30 bp, Artificial Sequence
  Synthetic primer
acgttggatggtggtaacagattgctgtac

SEQ ID NO: 814 - DNA, 31 bp, Artificial Sequence
  Synthetic primer
acgttggatggcgtaaagaacttttggtgac

SEQ ID NO: 815 - DNA, 31 bp, Artificial Sequence
  Synthetic primer
acgttggatgcaacacataccttaggtaaga

SEQ ID NO: 816 - DNA, 30 bp, Artificial Sequence
  Synthetic primer
acgttggatgctgaattccttcgatgttcc

SEQ ID NO: 817 - DNA, 31 bp, Artificial Sequence
  Synthetic primer
acgttggatgcattataaaaacagtttcttg

SEQ ID NO: 818 - DNA, 30 bp, Artificial Sequence
  Synthetic primer
acgttggatggagtagacagtggctattaa

SEQ ID NO: 819 - DNA, 30 bp, Artificial Sequence
  Synthetic primer
acgttggatggcttacactagctacttggg

SEQ ID NO: 820 - DNA, 30 bp, Artificial Sequence
  Synthetic primer
acgttggatggtgcaatcttggttcactgc

SEQ ID NO: 821 - DNA, 30 bp, Artificial Sequence
  Synthetic primer
acgttggatgtcccaccctgacttctttgc

SEQ ID NO: 822 - DNA, 31 bp, Artificial Sequence
  Synthetic primer
acgttggatggtaatccataaactgtgggag

SEQ ID NO: 823 - DNA, 30 bp, Artificial Sequence
  Synthetic primer
acgttggatgtagtccaagtatttcccaag

SEQ ID NO: 824 - DNA, 30 bp, Artificial Sequence
  Synthetic primer
acgttggatgaaaaggtcaccagtgacctg

SEQ ID NO: 825 - DNA, 30 bp, Artificial Sequence
  Synthetic primer
acgttggatgtaggcactgcagatcttttc

SEQ ID NO: 826 - DNA, 32 bp, Artificial Sequence
  Synthetic primer
acgttggatgcactaaaataataagaaagctc

SEQ ID NO: 827 - DNA, 30 bp, Artificial Sequence
  Synthetic primer
acgttggatgctgtatagagagctgtttgc

SEQ ID NO: 828 - DNA, 30 bp, Artificial Sequence
  Synthetic primer
acgttggatgagcactgtgagttaaacctg

SEQ ID NO: 829 - DNA, 30 bp, Artificial Sequence
  Synthetic primer
acgttggatgaatgttggaccacatgtacg

SEQ ID NO: 830 - DNA, 30 bp, Artificial Sequence
  Synthetic primer
acgttggatgctatggcagcagaagagtag

SEQ ID NO: 831 - DNA, 30 bp, Artificial Sequence
  Synthetic primer
acgttggatgtccactgaatgtgcacttcc

SEQ ID NO: 832 - DNA, 30 bp, Artificial Sequence
  Synthetic primer
acgttggatgcaagactgtagccctacaac

SEQ ID NO: 833 - DNA, 30 bp, Artificial Sequence
  Synthetic primer
acgttggatgcttctgccaagactatcagg

SEQ ID NO: 834 - DNA, 30 bp, Artificial Sequence
  Synthetic primer
acgttggatggtaagcatccccctaataat

SEQ ID NO: 835 - DNA, 30 bp, Artificial Sequence
  Synthetic primer
acgttggatggctggactctattaggccat

SEQ ID NO: 836 - DNA, 30 bp, Artificial Sequence
  Synthetic primer
acgttggatggatatctccctcctattggc

SEQ ID NO: 837 - DNA, 30 bp, Artificial Sequence
  Synthetic primer
acgttggatgtgcagatatgtaggccaagc

SEQ ID NO: 838 - DNA, 30 bp, Artificial Sequence
  Synthetic primer
acgttggatggatctctgatcttagaccac

SEQ ID NO: 839 - DNA, 30 bp, Artificial Sequence
  Synthetic primer
acgttggatggttctactttgaccacaggc

SEQ ID NO: 840 - DNA, 30 bp, Artificial Sequence
  Synthetic primer
acgttggatggaccagcaaccatgatgaag

SEQ ID NO: 841 - DNA, 30 bp, Artificial Sequence
  Synthetic primer
acgttggatgtagtctagtggaggatgtcg

SEQ ID NO: 842 - DNA, 30 bp, Artificial Sequence
  Synthetic primer
acgttggatgccagctataatgtagaccac

SEQ ID NO: 843 - DNA, 30 bp, Artificial Sequence
  Synthetic primer
acgttggatgtgtggaatctataatgtgtc

SEQ ID NO: 844 - DNA, 30 bp, Artificial Sequence
  Synthetic primer
acgttggatgacctacctcttctttgccag

SEQ ID NO: 845 - DNA, 30 bp, Artificial Sequence
  Synthetic primer
acgttggatgaatagaagatgctctaactc

SEQ ID NO: 846 - DNA, 31 bp, Artificial Sequence
  Synthetic primer
acgttggatggaagatgcaaataagtcaacc

SEQ ID NO: 847 - DNA, 30 bp, Artificial Sequence
  Synthetic primer
acgttggatggatatgctatgtgtgctaag

SEQ ID NO: 848 - DNA, 30 bp, Artificial Sequence
  Synthetic primer
acgttggatgttgtactttggtagtttggg

SEQ ID NO: 849 - DNA, 30 bp, Artificial Sequence
  Synthetic primer
acgttggatgaatcatgatcccagggcaag

SEQ ID NO: 850 - DNA, 30 bp, Artificial Sequence
  Synthetic primer
acgttggatgtagcaccttcaggatctttc

SEQ ID NO: 851 - DNA, 30 bp, Artificial Sequence
  Synthetic primer
acgttggatgggatttgttcttaatctttc

SEQ ID NO: 852 - DNA, 31 bp, Artificial Sequence
  Synthetic primer
acgttggatgcagaggaaagaaaactgaaag

SEQ ID NO: 853 - DNA, 30 bp, Artificial Sequence
  Synthetic primer
acgttggatgggtggctttgtgaaaccttg

SEQ ID NO: 854 - DNA, 30 bp, Artificial Sequence
  Synthetic primer
acgttggatgtcatactgatcaacctgaag

SEQ ID NO: 855 - DNA, 30 bp, Artificial Sequence
  Synthetic primer
acgttggatgaaggaaatttgtcagagagg

SEQ ID NO: 856 - DNA, 30 bp, Artificial Sequence
  Synthetic primer
acgttggatgcttttccatcacatcaaggg

SEQ ID NO: 857 - DNA, 30 bp, Artificial Sequence
  Synthetic primer
acgttggatggtcattgcctctagctagtg

SEQ ID NO: 858 - DNA, 30 bp, Artificial Sequence
  Synthetic primer
acgttggatgaacaacttggctaattctac

SEQ ID NO: 859 - DNA, 30 bp, Artificial Sequence
  Synthetic primer
acgttggatgttcgatatatcagagccttg

SEQ ID NO: 860 - DNA, 30 bp, Artificial Sequence
  Synthetic primer
acgttggatgcatggcgaggaaatctgttt

SEQ ID NO: 861 - DNA, 30 bp, Artificial Sequence
  Synthetic primer
acgttggatgtttctctcgtttcctctgtc

SEQ ID NO: 862 - DNA, 30 bp, Artificial Sequence
  Synthetic primer
acgttggatgacttacacatcttggaactc

SEQ ID NO: 863 - DNA, 22 bp, Artificial Sequence
  Synthetic primer
ttcttttctcttttaggaatct

SEQ ID NO: 864 - DNA, 20 bp, Artificial Sequence
  Synthetic primer
ggatgcatggtttctctaat

SEQ ID NO: 865 - DNA, 23 bp, Artificial Sequence
  Synthetic primer
gttttagcataattgcttcttta

SEQ ID NO: 866 - DNA, 17 bp, Artificial Sequence
  Synthetic primer
gtgctaggatcctcagt

SEQ ID NO: 867 - DNA, 17 bp, Artificial Sequence
  Synthetic primer
gtcacattcttaccctc

SEQ ID NO: 868 - DNA, 20 bp, Artificial Sequence
  Synthetic primer
cttcctggacattaaattgt

SEQ ID NO: 869 - DNA, 18 bp, Artificial Sequence
  Synthetic primer
agctaaattgcaacaaca

SEQ ID NO: 870 - DNA, 19 bp, Artificial Sequence
  Synthetic primer
cgaatctctttaactgctg

SEQ ID NO: 871 - DNA, 20 bp, Artificial Sequence
  Synthetic primer
gaatctctttaactgctgga

SEQ ID NO: 872 - DNA, 19 bp, Artificial Sequence
  Synthetic primer
actctcccactgagcaagc

SEQ ID NO: 873 - DNA, 18 bp, Artificial Sequence
  Synthetic primer
ctccaaaggatacccaga

SEQ ID NO: 874 - DNA, 19 bp, Artificial Sequence
  Synthetic primer
actctatccatgtctacac

SEQ ID NO: 875 - DNA, 21 bp, Artificial Sequence
  Synthetic primer
cggcttctactctcttattca

SEQ ID NO: 876 - DNA, 17 bp, Artificial Sequence
  Synthetic primer
tgtggctcaggtccagg

SEQ ID NO: 877 - DNA, 18 bp, Artificial Sequence
  Synthetic primer
ggaatgagggcaacagga

SEQ ID NO: 878 - DNA, 20 bp, Artificial Sequence
  Synthetic primer
tttggcaacaggtaaccagc

SEQ ID NO: 879 - DNA, 17 bp, Artificial Sequence
  Synthetic primer
agggctgcagggaagat

SEQ ID NO: 880 - DNA, 23 bp, Artificial Sequence
  Synthetic primer
cctgtgttcctttgtatttatat

SEQ ID NO: 881 - DNA, 21 bp, Artificial Sequence
  Synthetic primer
gataaatgtgagattgagaga

SEQ ID NO: 882 - DNA, 20 bp, Artificial Sequence
  Synthetic primer
gcattctagtggagaagtca

SEQ ID NO: 883 - DNA, 18 bp, Artificial Sequence
  Synthetic primer
ttagtggtgtgacttgca

SEQ ID NO: 884 - DNA, 23 bp, Artificial Sequence
  Synthetic primer
tttcccagattaattatcagatt

SEQ ID NO: 885 - DNA, 21 bp, Artificial Sequence
  Synthetic primer
ggtttcttctaaaactgacct

SEQ ID NO: 886 - DNA, 24 bp, Artificial Sequence
  Synthetic primer
ggtgactatttaagaaatatttgg

SEQ ID NO: 887 - DNA, 17 bp, Artificial Sequence
  Synthetic primer
gttcttgcctggtttac

SEQ ID NO: 888 - DNA, 19 bp, Artificial Sequence
  Synthetic primer
ccacctgcaccatcgccat

SEQ ID NO: 889 - DNA, 22 bp, Artificial Sequence
  Synthetic primer
tctattgcttgaagagagaaag

SEQ ID NO: 890 - DNA, 17 bp, Artificial Sequence
  Synthetic primer
ggtttgggggtttcatt

SEQ ID NO: 891 - DNA, 17 bp, Artificial Sequence
  Synthetic primer
tattcacacctgccttc

SEQ ID NO: 892 - DNA, 18 bp, Artificial Sequence
  Synthetic primer
gaaaactgttacccactc

SEQ ID NO: 893 - DNA, 23 bp, Artificial Sequence
  Synthetic primer
gtaatagatcacatgaaatggac

SEQ ID NO: 894 - DNA, 18 bp, Artificial Sequence
  Synthetic primer
ttatgtcttggtagagcc

SEQ ID NO: 895 - DNA, 17 bp, Artificial Sequence
  Synthetic primer
gagaagaaacctgccca

SEQ ID NO: 896 - DNA, 21 bp, Artificial Sequence
  Synthetic primer
ccagggtgctctggtttaatt

SEQ ID NO: 897 - DNA, 20 bp, Artificial Sequence
  Synthetic primer
caaggattatgttaaccact

SEQ ID NO: 898 - DNA, 20 bp, Artificial Sequence
  Synthetic primer
tgcaccgatcttcaaataaa

SEQ ID NO: 899 - DNA, 24 bp, Artificial Sequence
  Synthetic primer
ttttttgggatcttgatattttta

SEQ ID NO: 900 - DNA, 22 bp, Artificial Sequence
  Synthetic primer
agaaaaggtttttaaagtcctc

SEQ ID NO: 901 - DNA, 24 bp, Artificial Sequence
  Synthetic primer
aacttatgaaagaatatgaaggat

SEQ ID NO: 902 - DNA, 24 bp, Artificial Sequence
  Synthetic primer
attggcttaatctgtacatcaatt

SEQ ID NO: 903 - DNA, 21 bp, Artificial Sequence
  Synthetic primer
taagagaagtcttcagtgctt

SEQ ID NO: 904 - DNA, 18 bp, Artificial Sequence
  Synthetic primer
ctggatgatccattcaag

SEQ ID NO: 905 - DNA, 17 bp, Artificial Sequence
  Synthetic primer
actggacaactgaacac

SEQ ID NO: 906 - DNA, 24 bp, Artificial Sequence
  Synthetic primer
gcagagatttttcaaaatctctaa

SEQ ID NO: 907 - DNA, 18 bp, Artificial Sequence
  Synthetic primer
gcacatagtagtagctca

SEQ ID NO: 908 - DNA, 19 bp, Artificial Sequence
  Synthetic primer
cctcttgtcttattatccc

SEQ ID NO: 909 - DNA, 23 bp, Artificial Sequence
  Synthetic primer
tttttaaagctgaaaataaacca

SEQ ID NO: 910 - DNA, 24 bp, Artificial Sequence
  Synthetic primer
attattctgatggtaatgatccag

SEQ ID NO: 911 - DNA, 22 bp, Artificial Sequence
  Synthetic primer
tagagcagtaaaggaatctcaa

SEQ ID NO: 912 - DNA, 20 bp, Artificial Sequence
  Synthetic primer
tatttgtgccaggctctctg

SEQ ID NO: 913 - DNA, 20 bp, Artificial Sequence
  Synthetic primer
catgccgaaagcaatgtcac

SEQ ID NO: 914 - DNA, 23 bp, Artificial Sequence
  Synthetic primer
ctaaaacttcatctgtcttttca

SEQ ID NO: 915 - DNA, 18 bp, Artificial Sequence
  Synthetic primer
tctgaggtggaggctgcc

SEQ ID NO: 916 - DNA, 18 bp, Artificial Sequence
  Synthetic primer
tctgaggtggaggctgcc

SEQ ID NO: 917 - DNA, 19 bp, Artificial Sequence
  Synthetic primer
gggcaaggtattctcgtgc

SEQ ID NO: 918 - DNA, 23 bp, Artificial Sequence
  Synthetic primer
aatgaatcctccataagtttaca

SEQ ID NO: 919 - DNA, 22 bp, Artificial Sequence
  Synthetic primer
ttgcaatatgaatgaatcctcc

SEQ ID NO: 920 - DNA, 19 bp, Artificial Sequence
  Synthetic primer
aggaaaagtagcttctggg

SEQ ID NO: 921 - DNA, 20 bp, Artificial Sequence
  Synthetic primer
cagaagctacttttccttca

SEQ ID NO: 922 - DNA, 19 bp, Artificial Sequence
  Synthetic primer
gaattagagaagggtcact

SEQ ID NO: 923 - DNA, 22 bp, Artificial Sequence
  Synthetic primer
tatgaaaatagaagactttgcc

SEQ ID NO: 924 - DNA, 17 bp, Artificial Sequence
  Synthetic primer
gccgtcgaacaaatact

SEQ ID NO: 925 - DNA, 19 bp, Artificial Sequence
  Synthetic primer
gcttctctaagtacagctc

SEQ ID NO: 926 - DNA, 22 bp, Artificial Sequence
  Synthetic primer
cttatattctctgtggcaccaa

SEQ ID NO: 927 - DNA, 21 bp, Artificial Sequence
  Synthetic primer
gaggaagcatagatttggtgt

SEQ ID NO: 928 - DNA, 23 bp, Artificial Sequence
  Synthetic primer
ctaaacatctcttgaatattctg

SEQ ID NO: 929 - DNA, 22 bp, Artificial Sequence
  Synthetic primer
gctcaaatgttaccttctcaaa

SEQ ID NO: 930 - DNA, 19 bp, Artificial Sequence
  Synthetic primer
aacagcattctggcatata

SEQ ID NO: 931 - DNA, 18 bp, Artificial Sequence
  Synthetic primer
cagaaaaagtgcttgagg

SEQ ID NO: 932 - DNA, 17 bp, Artificial Sequence
  Synthetic primer
cagtttcttgtggtccc

SEQ ID NO: 933 - DNA, 17 bp, Artificial Sequence
  Synthetic primer
ggcttaaacctgggagg

SEQ ID NO: 934 - DNA, 23 bp, Artificial Sequence
  Synthetic primer
tttgcttatttcatagaaggaat

SEQ ID NO: 935 - DNA, 17 bp, Artificial Sequence
  Synthetic primer
tatttcccaagtgccca

SEQ ID NO: 936 - DNA, 20 bp, Artificial Sequence
  Synthetic primer
agcaacagaggctttttcta

SEQ ID NO: 937 - DNA, 23 bp, Artificial Sequence
  Synthetic primer
gagctgtttgcatttataactca

SEQ ID NO: 938 - DNA, 20 bp, Artificial Sequence
  Synthetic primer
accacatgtacgtaagggga

SEQ ID NO: 939 - DNA, 20 bp, Artificial Sequence
  Synthetic primer
tatgtgttgatgtcactctt

SEQ ID NO: 940 - DNA, 21 bp, Artificial Sequence
  Synthetic primer
ggttggtatagtacttgcgat

SEQ ID NO: 941 - DNA, 17 bp, Artificial Sequence
  Synthetic primer
ctgtcagttgccttagg

SEQ ID NO: 942 - DNA, 17 bp, Artificial Sequence
  Synthetic primer
agtcaagaccagctggg

SEQ ID NO: 943 - DNA, 17 bp, Artificial Sequence
  Synthetic primer
ctctttcttctgatccc

SEQ ID NO: 944 - DNA, 21 bp, Artificial Sequence
  Synthetic primer
ccttagattcccaaacaaaac

SEQ ID NO: 945 - DNA, 23 bp, Artificial Sequence
  Synthetic primer
tttggtttaaactaatgacacta

SEQ ID NO: 946 - DNA, 21 bp, Artificial Sequence
  Synthetic primer
agatgctctaactctggttca

SEQ ID NO: 947 - DNA, 24 bp, Artificial Sequence
  Synthetic primer
gctaagctattagttatactacga

SEQ ID NO: 948 - DNA, 17 bp, Artificial Sequence
  Synthetic primer
agtgcattacagtggtc

SEQ ID NO: 949 - DNA, 24 bp, Artificial Sequence
  Synthetic primer
ttgaaatactgtttgtttccccaa

SEQ ID NO: 950 - DNA, 17 bp, Artificial Sequence
  Synthetic primer
gaaaccttgcatgaact

SEQ ID NO: 951 - DNA, 22 bp, Artificial Sequence
  Synthetic primer
aagtatggaatagtatcttcct

SEQ ID NO: 952 - DNA, 24 bp, Artificial Sequence
  Synthetic primer
gtggggttagatattatttcctga

SEQ ID NO: 953 - DNA, 22 bp, Artificial Sequence
  Synthetic primer
aaacaccatctactctgaagaa

SEQ ID NO: 954 - DNA, 19 bp, Artificial Sequence
  Synthetic primer
cgtttcctctgtcccttcc

SEQ ID NO: 955 - DNA, 30 bp, Artificial Sequence
  Synthetic primer
acgttggatgacgtgtcggtcccctttcat

SEQ ID NO: 956 - DNA, 29 bp, Artificial Sequence
  Synthetic primer
acgttggatgacgcgccacacctccctac

SEQ ID NO: 957 - DNA, 30 bp, Artificial Sequence
  Synthetic primer
acgttggatgtgggcgaggttctgcagcgt

SEQ ID NO: 958 - DNA, 30 bp, Artificial Sequence
  Synthetic primer
acgttggatggtttcgtttctccggcacag

SEQ ID NO: 959 - DNA, 30 bp, Artificial Sequence
  Synthetic primer
acgttggatggaggagacccagggtatgag

SEQ ID NO: 960 - DNA, 29 bp, Artificial Sequence
  Synthetic primer
acgttggatgtctgggaccgtttaccgca

SEQ ID NO: 961 - DNA, 30 bp, Artificial Sequence
  Synthetic primer
acgttggatgcacacattcttctcaagtgc

SEQ ID NO: 962 - DNA, 30 bp, Artificial Sequence
  Synthetic primer
acgttggatgggagggacacaatttaactc

SEQ ID NO: 963 - DNA, 30 bp, Artificial Sequence
  Synthetic primer
acgttggatgggcaccatgtgtggctaatt

SEQ ID NO: 964 - DNA, 30 bp, Artificial Sequence
  Synthetic primer
acgttggatgaaggatcacgtgaagtcagg

SEQ ID NO: 965 - DNA, 30 bp, Artificial Sequence
  Synthetic primer
acgttggatggaaggtggagcagacattag

SEQ ID NO: 966 - DNA, 30 bp, Artificial Sequence
  Synthetic primer
acgttggatgaccttagttataccaggcac

SEQ ID NO: 967 - DNA, 30 bp, Artificial Sequence
  Synthetic primer
acgttggatgacagagaggcttggtcatac

SEQ ID NO: 968 - DNA, 30 bp, Artificial Sequence
  Synthetic primer
acgttggatgggtgcttggttgtgattctc

SEQ ID NO: 969 - DNA, 30 bp, Artificial Sequence
  Synthetic primer
acgttggatgattcctgcaggtactgtgtc

SEQ ID NO: 970 - DNA, 30 bp, Artificial Sequence
  Synthetic primer
acgttggatgtgagcccaaaactactgctg

SEQ ID NO: 971 - DNA, 30 bp, Artificial Sequence
  Synthetic primer
acgttggatgaccaccagataaaatccctc

SEQ ID NO: 972 - DNA, 30 bp, Artificial Sequence
  Synthetic primer
acgttggatgaagttcctctggtggacaac

SEQ ID NO: 973 - DNA, 30 bp, Artificial Sequence
  Synthetic primer
acgttggatgtgagtgacatttgtgtcacc

SEQ ID NO: 974 - DNA, 30 bp, Artificial Sequence
  Synthetic primer
acgttggatgcggaggatctgaacaacttc

SEQ ID NO: 975 - DNA, 30 bp, Artificial Sequence
  Synthetic primer
acgttggatggggagtcattccaataccag

SEQ ID NO: 976 - DNA, 30 bp, Artificial Sequence
  Synthetic primer
acgttggatgggagtgaaaggtcatattgg

SEQ ID NO: 977 - DNA, 31 bp, Artificial Sequence
  Synthetic primer
acgttggatgcacaatctgttagaatggtgg

SEQ ID NO: 978 - DNA, 30 bp, Artificial Sequence
  Synthetic primer
acgttggatgcgtcaagactgaatgcatag

SEQ ID NO: 979 - DNA, 30 bp, Artificial Sequence
  Synthetic primer
acgttggatggaaaatatagtcctacacaa

SEQ ID NO: 980 - DNA, 30 bp, Artificial Sequence; identical to SEQ ID NO: 978
  Synthetic primer

SEQ ID NO: 981 - DNA, 30 bp, Artificial Sequence
  Synthetic primer
acgttggatggttctaatgtcaccccttcc

SEQ ID NO: 982 - DNA, 30 bp, Artificial Sequence
  Synthetic primer
acgttggatgcaatgtggcaaattctctgg

SEQ ID NO: 983 - DNA, 30 bp, Artificial Sequence
  Synthetic primer
acgttggatgcaaatcacccctgacaattc

SEQ ID NO: 984 - DNA, 30 bp, Artificial Sequence
  Synthetic primer
acgttggatgaccagcacactcagctttag

SEQ ID NO: 985 - DNA, 30 bp, Artificial Sequence
  Synthetic primer
acgttggatgcagaaatatgaaggtggccc

SEQ ID NO: 986 - DNA, 30 bp, Artificial Sequence
  Synthetic primer
acgttggatgaccttgagctctgagccctt

SEQ ID NO: 987 - DNA, 30 bp, Artificial Sequence
  Synthetic primer
acgttggatgctcctcctcagaggactaac

SEQ ID NO: 988 - DNA, 30 bp, Artificial Sequence
  Synthetic primer
acgttggatgagcccaaggactcatacaac

SEQ ID NO: 989 - DNA, 30 bp, Artificial Sequence
  Synthetic primer
acgttggatgaaacatggcgaaacccggtc

SEQ ID NO: 990 - DNA, 30 bp, Artificial Sequence
  Synthetic primer
acgttggatgaccacgcctggctaattttg

SEQ ID NO: 991 - DNA, 29 bp, Artificial Sequence
  Synthetic primer
acgttggatgaccgggagctcccagtctg

SEQ ID NO: 992 - DNA, 30 bp, Artificial Sequence
  Synthetic primer
acgttggatgtgggaatcggttgagagccg

SEQ ID NO: 993 - DNA, 30 bp, Artificial Sequence
  Synthetic primer
acgttggatggcagcaaagaattgcccggc

SEQ ID NO: 994 - DNA, 30 bp, Artificial Sequence
  Synthetic primer
acgttggatgtaaggcgcctgcagaggcga

SEQ ID NO: 995 - DNA, 30 bp, Artificial Sequence
  Synthetic primer
acgttggatgctgcagttatctgggtgagc

SEQ ID NO: 996 - DNA, 30 bp, Artificial Sequence
  Synthetic primer
acgttggatgccagaacgtggcttgttggg

SEQ ID NO: 997 - DNA, 30 bp, Artificial Sequence
  Synthetic primer
acgttggatgtggtacctccaggtaaaatg

SEQ ID NO: 998 - DNA, 30 bp, Artificial Sequence
  Synthetic primer
acgttggatgtccaggcagtcattttaccc

SEQ ID NO: 999 - DNA, 30 bp, Artificial Sequence
  Synthetic primer
acgttggatgttctctgcggaggaaagtgc

SEQ ID NO: 1000 - DNA, 30 bp, Artificial Sequence
  Synthetic primer
acgttggatgttaagccagtccccacaagg

SEQ ID NO: 1001 - DNA, 30 bp, Artificial Sequence
  Synthetic primer
acgttggatgatcacttggactcaggaagc

SEQ ID NO: 1002 - DNA, 30 bp, Artificial Sequence
  Synthetic primer
acgttggatgagtcttgctctgtttccagg

SEQ ID NO: 1003 - DNA, 30 bp, Artificial Sequence
  Synthetic primer
acgttggatgtcacctgagcatcagacatg

SEQ ID NO: 1004 - DNA, 30 bp, Artificial Sequence
  Synthetic primer
acgttggatgatagtggaaggagaaacggg

SEQ ID NO: 1005 - DNA, 30 bp, Artificial Sequence
  Synthetic primer
acgttggatgaagcctcagatgaggcatac

SEQ ID NO: 1006 - DNA, 30 bp, Artificial Sequence
  Synthetic primer
acgttggatgtctgaaagggttcaggaagg

SEQ ID NO: 1007 - DNA, 30 bp, Artificial Sequence
  Synthetic primer
acgttggatgcgttgatgcactgaagggag

SEQ ID NO: 1008 - DNA, 30 bp, Artificial Sequence
  Synthetic primer
acgttggatgagaggctaaatgttggcagg

SEQ ID NO: 1009 - DNA, 30 bp, Artificial Sequence
  Synthetic primer
acgttggatgcaattgctcagaccttcacc

SEQ ID NO: 1010 - DNA, 30 bp, Artificial Sequence
  Synthetic primer
acgttggatgaatgctagagacattgcacc

SEQ ID NO: 1011 - DNA, 30 bp, Artificial Sequence
  Synthetic primer
acgttggatgtgaggacctcattattggtg

SEQ ID NO: 1012 - DNA, 30 bp, Artificial Sequence
  Synthetic primer
acgttggatgctgagcaatcgaactgctac

SEQ ID NO: 1013 - DNA, 30 bp, Artificial Sequence
  Synthetic primer
acgttggatgctagaattacaggtgcacac

SEQ ID NO: 1014 - DNA, 30 bp, Artificial Sequence
  Synthetic primer
acgttggatggccaagatggtgaaaccttg

SEQ ID NO: 1015 - DNA, 31 bp, Artificial Sequence
  Synthetic primer
acgttggatggcattttaccaccatgtggtt

SEQ ID NO: 1016 - DNA, 30 bp, Artificial Sequence
  Synthetic primer
acgttggatgccttcatgttaattctgccc

SEQ ID NO: 1017 - DNA, 30 bp, Artificial Sequence
  Synthetic primer
acgttggatgctttactgagtgggcaaacg

SEQ ID NO: 1018 - DNA, 30 bp, Artificial Sequence
  Synthetic primer
acgttggatgtctaagtggaactcagcagc

SEQ ID NO: 1019 - DNA, 30 bp, Artificial Sequence
  Synthetic primer
acgttggatgaatatcctaggctagcagtg

SEQ ID NO: 1020 - DNA, 30 bp, Artificial Sequence
  Synthetic primer
acgttggatggtgcataaatacatgaatag

SEQ ID NO: 1021 - DNA, 30 bp, Artificial Sequence
  Synthetic primer
acgttggatgtccaggtgttatggagtcag

SEQ ID NO: 1022 - DNA, 30 bp, Artificial Sequence
  Synthetic primer
acgttggatgggcttcttgtgctgctgtgt

SEQ ID NO: 1023 - DNA, 30 bp, Artificial Sequence
  Synthetic primer
acgttggatgtcaacaaagatgccaagacc

SEQ ID NO: 1024 - DNA, 30 bp, Artificial Sequence
  Synthetic primer
acgttggatggtggatatccattgtcctag

SEQ ID NO: 1025 - DNA, 30 bp, Artificial Sequence
  Synthetic primer
acgttggatgggctgagtaacagtccattg

SEQ ID NO: 1026 - DNA, 30 bp, Artificial Sequence
  Synthetic primer
acgttggatgcttacagtatccaaaaaggg

SEQ ID NO: 1027 - DNA, 30 bp, Artificial Sequence
  Synthetic primer
acgttggatgtcaaaggtaggttacccctg

SEQ ID NO: 1028 - DNA, 30 bp, Artificial Sequence
  Synthetic primer
acgttggatgatccccaatttgcacatccc

SEQ ID NO: 1029 - DNA, 30 bp, Artificial Sequence
  Synthetic primer
acgttggatgtgcagccctcaacctttcag

SEQ ID NO: 1030 - DNA, 31 bp, Artificial Sequence
  Synthetic primer
acgttggatgccttattcagttactattacg

SEQ ID NO: 1031 - DNA, 30 bp, Artificial Sequence
  Synthetic primer
acgttggatgaaacacacacacccacatac

SEQ ID NO: 1032 - DNA, 30 bp, Artificial Sequence
  Synthetic primer
acgttggatggggagaaagaaaacaaaggc

SEQ ID NO: 1033 - DNA, 30 bp, Artificial Sequence
  Synthetic primer
acgttggatgcaatgcctgcacttagacac

SEQ ID NO: 1034 - DNA, 30 bp, Artificial Sequence
  Synthetic primer
acgttggatgagtgatgagaacatgggctg

SEQ ID NO: 1035 - DNA, 30 bp, Artificial Sequence
  Synthetic primer
acgttggatggcaataggactccctttacc

SEQ ID NO: 1036 - DNA, 30 bp, Artificial Sequence
  Synthetic primer
acgttggatgaagatacgaatggagcctgg

SEQ ID NO: 1037 - DNA, 30 bp, Artificial Sequence
  Synthetic primer
acgttggatgtttttgagcttcactgagcg

SEQ ID NO: 1038 - DNA, 30 bp, Artificial Sequence
  Synthetic primer
acgttggatgcgtatctctagctcaagcat

SEQ ID NO: 1039 - DNA, 30 bp, Artificial Sequence
  Synthetic primer
acgttggatgcagaagttaggatgcagatg

SEQ ID NO: 1040 - DNA, 31 bp, Artificial Sequence
  Synthetic primer
acgttggatgccagtagagatagaattttgg

SEQ ID NO: 1041 - DNA, 30 bp, Artificial Sequence
  Synthetic primer
acgttggatgatacctagagtttgcccaac

SEQ ID NO: 1042 - DNA, 30 bp, Artificial Sequence
  Synthetic primer
acgttggatgagctgagatcaatccctatg

SEQ ID NO: 1043 - DNA, 30 bp, Artificial Sequence
  Synthetic primer
acgttggatggtggcagtcaaaacacagtc

SEQ ID NO: 1044 - DNA, 30 bp, Artificial Sequence
  Synthetic primer
acgttggatgacagagtaagactccgtctc

SEQ ID NO: 1045 - DNA, 30 bp, Artificial Sequence
  Synthetic primer
acgttggatggctattagaaagtcagagcc

SEQ ID NO: 1046 - DNA, 30 bp, Artificial Sequence
  Synthetic primer
acgttggatgtgttccagaaggtgtagaag

SEQ ID NO: 1047 - DNA, 30 bp, Artificial Sequence
  Synthetic primer
acgttggatgcttcagttcagggagagatc

SEQ ID NO: 1048 - DNA, 30 bp, Artificial Sequence
  Synthetic primer
acgttggatgatagggcccccagcataaaa

SEQ ID NO: 1049 - DNA, 30 bp, Artificial Sequence
  Synthetic primer
acgttggatggctttcccctaaagcatctc

SEQ ID NO: 1050 - DNA, 30 bp, Artificial Sequence
  Synthetic primer
acgttggatggatctctccctgaactgaag

SEQ ID NO: 1051 - DNA, 30 bp, Artificial Sequence
  Synthetic primer
acgttggatgtattccactgcctgctttcc

SEQ ID NO: 1052 - DNA, 30 bp, Artificial Sequence
  Synthetic primer
acgttggatggaaaacaggaggaagtggtg

SEQ ID NO: 1053 - DNA, 30 bp, Artificial Sequence
  Synthetic primer
acgttggatgatgtcaagtgcacccacatg

SEQ ID NO: 1054 - DNA, 30 bp, Artificial Sequence
  Synthetic primer
acgttggatgaggaagaaactgacggaagg

SEQ ID NO: 1055 - DNA, 30 bp, Artificial Sequence; identical to SEQ ID NO: 1053
  Synthetic primer

SEQ ID NO: 1056 - DNA, 30 bp, Artificial Sequence; identical to SEQ ID NO: 1054
  Synthetic primer

SEQ ID NO: 1057 - DNA, 30 bp, Artificial Sequence
  Synthetic primer
acgttggatgtctcaccttgcctttggacg

SEQ ID NO: 1058 - DNA, 30 bp, Artificial Sequence
  Synthetic primer
acgttggatgctgatgtcgcaaggaaccac

SEQ ID NO: 1059 - DNA, 30 bp, Artificial Sequence
  Synthetic primer
acgttggatgcctgttgaattatggaggag

SEQ ID NO: 1060 - DNA, 31 bp, Artificial Sequence
  Synthetic primer
acgttggatgctcttctttccatggatcttc

SEQ ID NO: 1061 - DNA, 31 bp, Artificial Sequence; identical to SEQ ID NO: 1060
  Synthetic primer

SEQ ID NO: 1062 - DNA, 30 bp, Artificial Sequence
  Synthetic primer
acgttggatgcagctaatttctcctgacag

SEQ ID NO: 1063 - DNA, 30 bp, Artificial Sequence
  Synthetic primer
acgttggatgatgcaaactggctgggaatg

SEQ ID NO: 1064 - DNA, 30 bp, Artificial Sequence
  Synthetic primer
acgttggatggaggaggctgtgagaaaaga

SEQ ID NO: 1065 - DNA, 30 bp, Artificial Sequence
  Synthetic primer
acgttggatgatgccctggattgacctaac

SEQ ID NO: 1066 - DNA, 30 bp, Artificial Sequence
  Synthetic primer
acgttggatggggttagggtgtgtataagg

SEQ ID NO: 1067 - DNA, 30 bp, Artificial Sequence
  Synthetic primer
acgttggatgaacccgcactacaagattcc

SEQ ID NO: 1068 - DNA, 30 bp, Artificial Sequence
  Synthetic primer
acgttggatggtcagtcccacattcagaac

SEQ ID NO: 1069 - DNA, 30 bp, Artificial Sequence
  Synthetic primer
acgttggatgtcccgaacataaagactcag

SEQ ID NO: 1070 - DNA, 30 bp, Artificial Sequence
  Synthetic primer
acgttggatgggttgtaattggaacattgg

SEQ ID NO: 1071 - DNA, 30 bp, Artificial Sequence
  Synthetic primer
acgttggatggtctgccaaagttcccttag

SEQ ID NO: 1072 - DNA, 30 bp, Artificial Sequence
  Synthetic primer
acgttggatgaggaaagggaagagaaaccg

SEQ ID NO: 1073 - DNA, 30 bp, Artificial Sequence
  Synthetic primer
acgttggatggactgtgagttataggatac

SEQ ID NO: 1074 - DNA, 30 bp, Artificial Sequence
  Synthetic primer
acgttggatgatgggtcggaggatttatag

SEQ ID NO: 1075 - DNA, 30 bp, Artificial Sequence
  Synthetic primer
acgttggatgctcggctaaggtactcaata

SEQ ID NO: 1076 - DNA, 30 bp, Artificial Sequence
  Synthetic primer
acgttggatgagaccaccaagtaaaattgc

SEQ ID NO: 1077 - DNA, 30 bp, Artificial Sequence
  Synthetic primer
acgttggatgttgggttaatgcagggtctg

SEQ ID NO: 1078 - DNA, 30 bp, Artificial Sequence
  Synthetic primer
acgttggatgctagttcacctgggtctatc

SEQ ID NO: 1079 - DNA, 31 bp, Artificial Sequence
  Synthetic primer
acgttggatgccaaagcccatgttttaaaaa

SEQ ID NO: 1080 - DNA, 30 bp, Artificial Sequence
  Synthetic primer
acgttggatggtttttctaaaatatgggct

SEQ ID NO: 1081 - DNA, 30 bp, Artificial Sequence
  Synthetic primer
acgttggatgaaaccagctcaggccattac

SEQ ID NO: 1082 - DNA, 30 bp, Artificial Sequence
  Synthetic primer
acgttggatgatgcaaaataagctctgccc

SEQ ID NO: 1083 - DNA, 30 bp, Artificial Sequence
  Synthetic primer
acgttggatgggtgtactctgccatttgtc

SEQ ID NO: 1084 - DNA, 30 bp, Artificial Sequence
  Synthetic primer
acgttggatgtggaggaggttctagtaccc

SEQ ID NO: 1085 - DNA, 30 bp, Artificial Sequence
  Synthetic primer
acgttggatgagttgtgagtgatttcaggg

SEQ ID NO: 1086 - DNA, 30 bp, Artificial Sequence
  Synthetic primer
acgttggatgcaggccttcttgctcttatc

SEQ ID NO: 1087 - DNA, 30 bp, Artificial Sequence
  Synthetic primer
acgttggatgctgtgccttctgagtagttc

SEQ ID NO: 1088 - DNA, 30 bp, Artificial Sequence
  Synthetic primer
acgttggatgatctgttgccttaggttcac

SEQ ID NO: 1089 - DNA, 30 bp, Artificial Sequence
  Synthetic primer
acgttggatgctctcaattccatcagtctc

SEQ ID NO: 1090 - DNA, 31 bp, Artificial Sequence
  Synthetic primer
acgttggatgctttacgaatttcacaacagg

SEQ ID NO: 1091 - DNA, 30 bp, Artificial Sequence
  Synthetic primer
acgttggatgtatgcttccagtctctgacc

SEQ ID NO: 1092 - DNA, 30 bp, Artificial Sequence
  Synthetic primer
acgttggatgataggtaatccagttgggcc

SEQ ID NO: 1093 - DNA, 30 bp, Artificial Sequence
  Synthetic primer
acgttggatgctcaggtaatctgccttctc

SEQ ID NO: 1094 - DNA, 31 bp, Artificial Sequence
  Synthetic primer
acgttggatgcagggataatgagaacaaatc

SEQ ID NO: 1095 - DNA, 30 bp, Artificial Sequence
  Synthetic primer
acgttggatgaacaaccttacttcatgccc

SEQ ID NO: 1096 - DNA, 30 bp, Artificial Sequence
  Synthetic primer
acgttggatgttctccactttctggtcaac

SEQ ID NO: 1097 - DNA, 30 bp, Artificial Sequence
  Synthetic primer
acgttggatgtggatactgagggtcaactg

SEQ ID NO: 1098 - DNA, 30 bp, Artificial Sequence
  Synthetic primer
acgttggatgcttcccaacattttcggctc

SEQ ID NO: 1099 - DNA, 18 bp, Artificial Sequence
  Synthetic primer
gtcccctttcatctaaac

SEQ ID NO: 1100 - DNA, 17 bp, Artificial Sequence
  Synthetic primer
tctgcagcgtgcggcga

SEQ ID NO: 1101 - DNA, 19 bp, Artificial Sequence
  Synthetic primer
ccagggtatgagcggagga

SEQ ID NO: 1102 - DNA, 22 bp, Artificial Sequence
  Synthetic primer
agtgcacacagaacatttaaca

SEQ ID NO: 1103 - DNA, 20 bp, Artificial Sequence
  Synthetic primer
tgtggagacaaggtctcact

SEQ ID NO: 1104 - DNA, 17 bp, Artificial Sequence
  Synthetic primer
tgggcaaacaagcccat

SEQ ID NO: 1105 - DNA, 17 bp, Artificial Sequence
  Synthetic primer
tggtcatacccttcaag

SEQ ID NO: 1106 - DNA, 17 bp, Artificial Sequence
  Synthetic primer
gaagggtatgaccaagc

SEQ ID NO: 1107 - DNA, 17 bp, Artificial Sequence
  Synthetic primer
agttgttcagatcctcc

SEQ ID NO: 1108 - DNA, 22 bp, Artificial Sequence
  Synthetic primer
tccaaaaccaccagataaaatc

SEQ ID NO: 1109 - DNA, 17 bp, Artificial Sequence
  Synthetic primer
gtattgtcctccagtga

SEQ ID NO: 1110 - DNA, 21 bp, Artificial Sequence
  Synthetic primer
agaatggtggtgtatttttac

SEQ ID NO: 1111 - DNA, 20 bp, Artificial Sequence
  Synthetic primer
tagtcctacacaatctgtta

SEQ ID NO: 1112 - DNA, 17 bp, Artificial Sequence
  Synthetic primer
ggtatcaggaagagtca

SEQ ID NO: 1113 - DNA, 21 bp, Artificial Sequence
  Synthetic primer
ccctgacaattccaaaactaa

SEQ ID NO: 1114 - DNA, 18 bp, Artificial Sequence
  Synthetic primer
ggaggaggcactattaat

SEQ ID NO: 1115 - DNA, 17 bp, Artificial Sequence
  Synthetic primer
ggccaccttcatatttc

SEQ ID NO: 1116 - DNA, 19 bp, Artificial Sequence
  Synthetic primer
caggagatccagaccatcc

SEQ ID NO: 1117 - DNA, 18 bp, Artificial Sequence
  Synthetic primer
tgcggcccccgccgggtt

SEQ ID NO: 1118 - DNA, 19 bp, Artificial Sequence
  Synthetic primer
gaattgcccggctccgaat

SEQ ID NO: 1119 - DNA, 17 bp, Artificial Sequence
  Synthetic primer
gagcaggcagcacaagt

SEQ ID NO: 1120 - DNA, 23 bp, Artificial Sequence
  Synthetic primer
acctccaggtaaaatgattagtt

SEQ ID NO: 1121 - DNA, 17 bp, Artificial Sequence
  Synthetic primer
cagggatggtaattgac

SEQ ID NO: 1122 - DNA, 20 bp, Artificial Sequence
  Synthetic primer
aagcggaggttgcagtgagc

SEQ ID NO: 1123 - DNA, 19 bp, Artificial Sequence
  Synthetic primer
gacatgtccctctcggcct

SEQ ID NO: 1124 - DNA, 17 bp, Artificial Sequence
  Synthetic primer
ggcaatgtttgcccttt

SEQ ID NO: 1125 - DNA, 19 bp, Artificial Sequence
  Synthetic primer
gggagaaagtaacagggtc

SEQ ID NO: 1126 - DNA, 17 bp, Artificial Sequence
  Synthetic primer
caggtggatggggacac

SEQ ID NO: 1127 - DNA, 17 bp, Artificial Sequence
  Synthetic primer
tggtgttaagtggcgtg

SEQ ID NO: 1128 - DNA, 19 bp, Artificial Sequence
  Synthetic primer
cacaccaccacgcccggct

SEQ ID NO: 1129 - DNA, 20 bp, Artificial Sequence
  Synthetic primer
ctgctattcatttgtgtaga

SEQ ID NO: 1130 - DNA, 19 bp, Artificial Sequence
  Synthetic primer
ctctgatgttacctcctcc

SEQ ID NO: 1131 - DNA, 20 bp, Artificial Sequence
  Synthetic primer
ctaggctagcagtggggttg

SEQ ID NO: 1132 - DNA, 18 bp, Artificial Sequence
  Synthetic primer
ggcagggaagagaagagc

SEQ ID NO: 1133 - DNA, 21 bp, Artificial Sequence
  Synthetic primer
agatgccaagaccattcaaag

SEQ ID NO: 1134 - DNA, 19 bp, Artificial Sequence
  Synthetic primer
tagttgatgaagatttggg

SEQ ID NO: 1135 - DNA, 20 bp, Artificial Sequence
  Synthetic primer
aggttacccctgctgacttt

SEQ ID NO: 1136 - DNA, 20 bp, Artificial Sequence
  Synthetic primer
gagatcatttctccttcaac

SEQ ID NO: 1137 - DNA, 23 bp, Artificial Sequence
  Synthetic primer
ccacacccatatatatttatgct

SEQ ID NO: 1138 - DNA, 21 bp, Artificial Sequence
  Synthetic primer
aaagatacaccgttgagaagg

SEQ ID NO: 1139 - DNA, 20 bp, Artificial Sequence
  Synthetic primer
gactccctttaccttcatgg

SEQ ID NO: 1140 - DNA, 19 bp, Artificial Sequence
  Synthetic primer
cttcactgagcgtggtgcc

SEQ ID NO: 1141 - DNA, 19 bp, Artificial Sequence
  Synthetic primer
cacagatgctcatgggtcc

SEQ ID NO: 1142 - DNA, 24 bp, Artificial Sequence
  Synthetic primer
gtttgcccaacatataaacaataa

SEQ ID NO: 1143 - DNA, 23 bp, Artificial Sequence
  Synthetic primer
aacacagtcaaaattttgcttca

SEQ ID NO: 1144 - DNA, 23 bp, Artificial Sequence
  Synthetic primer
gagccaagtttacatcaagttta

SEQ ID NO: 1145 - DNA, 21 bp, Artificial Sequence
  Synthetic primer
agatcacattgccaaccccca

SEQ ID NO: 1146 - DNA, 18 bp, Artificial Sequence
  Synthetic primer
cccgtctcctgctggtca

SEQ ID NO: 1147 - DNA, 22 bp, Artificial Sequence
  Synthetic primer
ccctaaagcatctcacagcccc

SEQ ID NO: 1148 - DNA, 19 bp, Artificial Sequence
  Synthetic primer
cacatgcctgctcgccccc

SEQ ID NO: 1149 - DNA, 18 bp, Artificial Sequence
  Synthetic primer
cacatgcctgctcgcccc

SEQ ID NO: 1150 - DNA, 19 bp, Artificial Sequence
  Synthetic primer
tgcctttggacgtctagcc

SEQ ID NO: 1151 - DNA, 22 bp, Artificial Sequence
  Synthetic primer
tatggaggagtagatattggaa

SEQ ID NO: 1152 - DNA, 23 bp, Artificial Sequence
  Synthetic primer
gaaaattccaatatctactcctc

SEQ ID NO: 1153 - DNA, 21 bp, Artificial Sequence
  Synthetic primer
ctgggaatgaaattagggcag

SEQ ID NO: 1154 - DNA, 20 bp, Artificial Sequence
  Synthetic primer
gttcccttgactttcctcag

SEQ ID NO: 1155 - DNA, 18 bp, Artificial Sequence
  Synthetic primer
gcatcttcaggaatcttg

SEQ ID NO: 1156 - DNA, 21 bp, Artificial Sequence
  Synthetic primer
cataaagactcagcattcagc

SEQ ID NO: 1157 - DNA, 19 bp, Artificial Sequence
  Synthetic primer
ggttaggaagaaatctgtg

SEQ ID NO: 1158 - DNA, 23 bp, Artificial Sequence
  Synthetic primer
atctagataataaagaccaccaa

SEQ ID NO: 1159 - DNA, 23 bp, Artificial Sequence
  Synthetic primer
ctattaatggtgtttgtctatgg

SEQ ID NO: 1160 - DNA, 20 bp, Artificial Sequence
  Synthetic primer
taatgcagggtctgctggat

SEQ ID NO: 1161 - DNA, 23 bp, Artificial Sequence
  Synthetic primer
atctctaagatataacactctac

SEQ ID NO: 1162 - DNA, 20 bp, Artificial Sequence
  Synthetic primer
gtgcctgcaaagaaaggaac

SEQ ID NO: 1163 - DNA, 20 bp, Artificial Sequence
  Synthetic primer
ttgtcagttatgagaccttg

SEQ ID NO: 1164 - DNA, 24 bp, Artificial Sequence
  Synthetic primer
atacctcagaatacagcttttttt

SEQ ID NO: 1165 - DNA, 20 bp, Artificial Sequence
  Synthetic primer
tctcatttctcctctctttc

SEQ ID NO: 1166 - DNA, 17 bp, Artificial Sequence
  Synthetic primer
ctcatttccacccttct

SEQ ID NO: 1167 - DNA, 20 bp, Artificial Sequence
  Synthetic primer
gtctctgaccacttgaccca

SEQ ID NO: 1168 - DNA, 17 bp, Artificial Sequence
  Synthetic primer
tccttcttctctgcttt

SEQ ID NO: 1169 - DNA, 18 bp, Artificial Sequence
  Synthetic primer
tcatgcccattgggttag

SEQ ID NO: 1170 - DNA, 17 bp, Artificial Sequence
  Synthetic primer
gggtcaactgtaccaag

SEQ ID NO: 1171 - DNA, 30 bp, Artificial Sequence
  Synthetic primer
acgttggatgtgtcagaaagcaaacctggc

SEQ ID NO: 1172 - DNA, 30 bp, Artificial Sequence
  Synthetic primer
acgttggatgttacaggcattggagacagc

SEQ ID NO: 1173 - DNA, 30 bp, Artificial Sequence
  Synthetic primer
acgttggatgctgcataatggtggctttgg

SEQ ID NO: 1174 - DNA, 30 bp, Artificial Sequence
  Synthetic primer
acgttggatgtgtgggtgttcactttgcag

SEQ ID NO: 1175 - DNA, 30 bp, Artificial Sequence
  Synthetic primer
acgttggatgccctcttgtcaggaagttct

SEQ ID NO: 1176 - DNA, 30 bp, Artificial Sequence
  Synthetic primer
acgttggatggagacagagttgaactcccg

SEQ ID NO: 1177 - DNA, 30 bp, Artificial Sequence; identical to SEQ ID NO: 1054
  Synthetic primer

SEQ ID NO: 1178 - DNA, 30 bp, Artificial Sequence; identical to SEQ ID NO: 1053
  Synthetic primer

SEQ ID NO: 1179 - DNA, 30 bp, Artificial Sequence; identical to SEQ ID NO: 1036
  Synthetic primer

SEQ ID NO: 1180 - DNA, 30 bp, Artificial Sequence; identical to SEQ ID NO: 1035
  Synthetic primer

SEQ ID NO: 1181 - DNA, 30 bp, Artificial Sequence
  Synthetic primer
acgttggatgcgcactacaagattccaagc

SEQ ID NO: 1182 - DNA, 30 bp, Artificial Sequence
  Synthetic primer
acgttggatgtcagtcccacattcagaacc

SEQ ID NO: 1183 - DNA, 30 bp, Artificial Sequence; identical to SEQ ID NO: 1174
  Synthetic primer

SEQ ID NO: 1184 - DNA, 30 bp, Artificial Sequence; identical to SEQ ID NO: 1173
  Synthetic primer

SEQ ID NO: 1185 - DNA, 30 bp, Artificial Sequence; identical to SEQ ID NO: 957
  Synthetic primer

SEQ ID NO: 1186 - DNA, 30 bp, Artificial Sequence; identical to SEQ ID NO: 958
  Synthetic primer

SEQ ID NO: 1187 - DNA, 30 bp, Artificial Sequence
  Synthetic primer
acgttggatggatgcactgaagggagaaag

SEQ ID NO: 1188 - DNA, 30 bp, Artificial Sequence; identical to SEQ ID NO: 1008
  Synthetic primer

SEQ ID NO: 1189 - DNA, 30 bp, Artificial Sequence; identical to SEQ ID NO: 970
  Synthetic primer

SEQ ID NO: 1190 - DNA, 30 bp, Artificial Sequence; identical to SEQ ID NO: 969
  Synthetic primer

SEQ ID NO: 1191 - DNA, 30 bp, Artificial Sequence; identical to SEQ ID NO: 1086
  Synthetic primer

SEQ ID NO: 1192 - DNA, 30 bp, Artificial Sequence; identical to SEQ ID NO: 1085
  Synthetic primer

SEQ ID NO: 1193 - DNA, 30 bp, Artificial Sequence; identical to SEQ ID NO: 1091
  Synthetic primer

SEQ ID NO: 1194 - DNA, 30 bp, Artificial Sequence
  Synthetic primer
acgttggatggataggtaatccagttgggc

SEQ ID NO: 1195 - DNA, 30 bp, Artificial Sequence; identical to SEQ ID NO: 1050
  Synthetic primer

SEQ ID NO: 1196 - DNA, 30 bp, Artificial Sequence; identical to SEQ ID NO: 1049
  Synthetic primer

SEQ ID NO: 1197 - DNA, 30 bp, Artificial Sequence; identical to SEQ ID NO: 1019
  Synthetic primer

SEQ ID NO: 1198 - DNA, 30 bp, Artificial Sequence; identical to SEQ ID NO: 1020
  Synthetic primer

SEQ ID NO: 1199 - DNA, 17 bp, Artificial Sequence
  Synthetic primer
tgatgcacgtggagcag

SEQ ID NO: 1200 - DNA, 17 bp, Artificial Sequence
  Synthetic primer
gcccctggaaaaggccc

SEQ ID NO: 1201 - DNA, 20 bp, Artificial Sequence
  Synthetic primer
ggaagatgatgagactaaat

SEQ ID NO: 1202 - DNA, 19 bp, Artificial Sequence
  Synthetic primer
cacatgcctgctcgccccc

SEQ ID NO: 1203 - DNA, 17 bp, Artificial Sequence
  Synthetic primer
tccctttaccttcatgg

SEQ ID NO: 1204 - DNA, 18 bp, Artificial Sequence
  Synthetic primer
gcatcttcaggaatcttg

SEQ ID NO: 1205 - DNA, 17 bp, Artificial Sequence
  Synthetic primer
gcccctggaaaaggccc

SEQ ID NO: 1206 - DNA, 20 bp, Artificial Sequence
  Synthetic primer
ggttctgcagcgtgcggcga

SEQ ID NO: 1207 - DNA, 22 bp, Artificial Sequence
  Synthetic primer
gaagggagaaagtaacagggtc

SEQ ID NO: 1208 - DNA, 17 bp, Artificial Sequence
  Synthetic primer
tggtcatacccttcaag

SEQ ID NO: 1209 - DNA, 21 bp, Artificial Sequence
  Synthetic primer
atcttctacacattgattcag

SEQ ID NO: 1210 - DNA, 19 bp, Artificial Sequence
  Synthetic primer
tctctgaccacttgaccca

SEQ ID NO: 1211 - DNA, 17 bp, Artificial Sequence
  Synthetic primer
tggtgaccagcaggaga

SEQ ID NO: 1212 - DNA, 17 bp, Artificial Sequence
  Synthetic primer
ggctagcagtggggttg

SEQ ID NO: 1213 - DNA, 30 bp, Artificial Sequence
  Synthetic primer
acgttggatgggcacacagtaggtgcttat

SEQ ID NO: 1214 - DNA, 30 bp, Artificial Sequence
  Synthetic primer
acgttggatgccaccagcttgtgaggtaat

SEQ ID NO: 1215 - DNA, 30 bp, Artificial Sequence
  Synthetic primer
acgttggatgtgcagtgaactgcactccag

SEQ ID NO: 1216 - DNA, 30 bp, Artificial Sequence
  Synthetic primer
acgttggatgctggccagtaactactagct

SEQ ID NO: 1217 - DNA, 30 bp, Artificial Sequence
  Synthetic primer
acgttggatgttactgagtttcctaggctg

SEQ ID NO: 1218 - DNA, 30 bp, Artificial Sequence
  Synthetic primer
acgttggatggaatcccaacactttgggag

SEQ ID NO: 1219 - DNA, 30 bp, Artificial Sequence
  Synthetic primer
acgttggatggaacacacacagctctattc

SEQ ID NO: 1220 - DNA, 30 bp, Artificial Sequence
  Synthetic primer
acgttggatgcacatccttttcaccgtgtc

SEQ ID NO: 1221 - DNA, 30 bp, Artificial Sequence
  Synthetic primer
acgttggatgggtttcaccatattggccag

SEQ ID NO: 1222 - DNA, 30 bp, Artificial Sequence
  Synthetic primer
acgttggatgcacgcctataatccaaacac

SEQ ID NO: 1223 - DNA, 30 bp, Artificial Sequence
  Synthetic primer
acgttggatgaaactggatgtgttcctggg

SEQ ID NO: 1224 - DNA, 30 bp, Artificial Sequence
  Synthetic primer
acgttggatggtagactcagagcttaggtg

SEQ ID NO: 1225 - DNA, 31 bp, Artificial Sequence
  Synthetic primer
acgttggatggctactgatcaaattaagtgg

SEQ ID NO: 1226 - DNA, 30 bp, Artificial Sequence
  Synthetic primer
acgttggatggctgcatttgcttatgaacc

SEQ ID NO: 1227 - DNA, 30 bp, Artificial Sequence
  Synthetic primer
acgttggatgagacaatctcagaaagaggg

SEQ ID NO: 1228 - DNA, 30 bp, Artificial Sequence
  Synthetic primer
acgttggatgatccataaggaggaaagggc

SEQ ID NO: 1229 - DNA, 30 bp, Artificial Sequence
  Synthetic primer
acgttggatgagaccaagctacagtatccc

SEQ ID NO: 1230 - DNA, 30 bp, Artificial Sequence
  Synthetic primer
acgttggatgggtagctgcaagtcattgtc

SEQ ID NO: 1231 - DNA, 30 bp, Artificial Sequence
  Synthetic primer
acgttggatgaagtgcgggcaaactatgac

SEQ ID NO: 1232 - DNA, 30 bp, Artificial Sequence
  Synthetic primer
acgttggatgtcctcaagaggtgttcatgg

SEQ ID NO: 1233 - DNA, 30 bp, Artificial Sequence
  Synthetic primer
acgttggatgagacagcagactggatttgg

SEQ ID NO: 1234 - DNA, 30 bp, Artificial Sequence
  Synthetic primer
acgttggatgactactctgggacacacaag

SEQ ID NO: 1235 - DNA, 30 bp, Artificial Sequence; identical to SEQ ID NO: 1234
  Synthetic primer

SEQ ID NO: 1236 - DNA, 30 bp, Artificial Sequence
  Synthetic primer
acgttggatgtttggtcatagtttgcccgc

SEQ ID NO: 1237 - DNA, 30 bp, Artificial Sequence
  Synthetic primer
acgttggatgcctgttgcccatgtaatgag

SEQ ID NO: 1238 - DNA, 30 bp, Artificial Sequence
  Synthetic primer
acgttggatgtacaagaggaggagggagtg

SEQ ID NO: 1239 - DNA, 30 bp, Artificial Sequence
  Synthetic primer
acgttggatgagtttatctgggcaaaaacc

SEQ ID NO: 1240 - DNA, 30 bp, Artificial Sequence
  Synthetic primer
acgttggatgaatgcctgctatgtgtctag

SEQ ID NO: 1241 - DNA, 32 bp, Artificial Sequence
  Synthetic primer
acgttggatggaaatatttacttgcgtttctc

SEQ ID NO: 1242 - DNA, 30 bp, Artificial Sequence
  Synthetic primer
acgttggatgtggacatcacggagagatgc

SEQ ID NO: 1243 - DNA, 30 bp, Artificial Sequence
  Synthetic primer
acgttggatgctggatcaaattgaaaacag

SEQ ID NO: 1244 - DNA, 30 bp, Artificial Sequence
  Synthetic primer
acgttggatggaaggtaaagcacaagacag

SEQ ID NO: 1245 - DNA, 30 bp, Artificial Sequence
  Synthetic primer
acgttggatgtgggcagagtttctgtttgg

SEQ ID NO: 1246 - DNA, 31 bp, Artificial Sequence
  Synthetic primer
acgttggatggcattaattacatttgcagtg

SEQ ID NO: 1247 - DNA, 30 bp, Artificial Sequence
  Synthetic primer
acgttggatgtcccaaacagaaactctgcc

SEQ ID NO: 1248 - DNA, 30 bp, Artificial Sequence
  Synthetic primer
acgttggatgaggcatgttcacagagatgg

SEQ ID NO: 1249 - DNA, 30 bp, Artificial Sequence
  Synthetic primer
acgttggatgatcatatccctccccagtcc

SEQ ID NO: 1250 - DNA, 30 bp, Artificial Sequence
  Synthetic primer
acgttggatgaagacctcctgggtgggaaa

SEQ ID NO: 1251 - DNA, 30 bp, Artificial Sequence
  Synthetic primer
acgttggatgtgggtgggaaagactcaaag

SEQ ID NO: 1252 - DNA, 30 bp, Artificial Sequence
  Synthetic primer
acgttggatgtccatcatatccctccccag

SEQ ID NO: 1253 - DNA, 30 bp, Artificial Sequence
  Synthetic primer
acgttggatgctgattcttccagttgtccc

SEQ ID NO: 1254 - DNA, 30 bp, Artificial Sequence
  Synthetic primer
acgttggatgaccttatcagtgacttggcc

SEQ ID NO: 1255 - DNA, 30 bp, Artificial Sequence
  Synthetic primer
acgttggatgatcctgcttcgttcttgctg

SEQ ID NO: 1256 - DNA, 30 bp, Artificial Sequence
  Synthetic primer
acgttggatgaagtgggaggtcaaacatgg

SEQ ID NO: 1257 - DNA, 30 bp, Artificial Sequence
  Synthetic primer
acgttggatgattccaccactcctagggat

SEQ ID NO: 1258 - DNA, 30 bp, Artificial Sequence
  Synthetic primer
acgttggatgttaacccccatcggagacct

SEQ ID NO: 1259 - DNA, 30 bp, Artificial Sequence
  Synthetic primer
acgttggatgtgagtgtggtcctcaggaag

SEQ ID NO: 1260 - DNA, 30 bp, Artificial Sequence
  Synthetic primer
acgttggatgcagactgaggttgctctatg

SEQ ID NO: 1261 - DNA, 30 bp, Artificial Sequence
  Synthetic primer
acgttggatgactcaggctcggcttctctt

SEQ ID NO: 1262 - DNA, 30 bp, Artificial Sequence
  Synthetic primer
acgttggatgacaggtggcataagcagcag

SEQ ID NO: 1263 - DNA, 30 bp, Artificial Sequence
  Synthetic primer
acgttggatgtgtcaggctcaggtgagaag

SEQ ID NO: 1264 - DNA, 30 bp, Artificial Sequence
  Synthetic primer
acgttggatggaggtcaagggactcagaac

SEQ ID NO: 1265 - DNA, 30 bp, Artificial Sequence
  Synthetic primer
acgttggatggactgtctctctcagaaacc

SEQ ID NO: 1266 - DNA, 30 bp, Artificial Sequence
  Synthetic primer
acgttggatgattcctcccaagaacaccag

SEQ ID NO: 1267 - DNA, 30 bp, Artificial Sequence
  Synthetic primer
acgttggatgcctccttagatttagcatcc

SEQ ID NO: 1268 - DNA, 30 bp, Artificial Sequence
  Synthetic primer
acgttggatgtcactgatgggacaaatggc

SEQ ID NO: 1269 - DNA, 30 bp, Artificial Sequence
  Synthetic primer
acgttggatgttgccagagccagtgttgag

SEQ ID NO: 1270 - DNA, 30 bp, Artificial Sequence
  Synthetic primer
acgttggatgaggaactggcacacaagctc

SEQ ID NO: 1271 - DNA, 30 bp, Artificial Sequence
  Synthetic primer
acgttggatgttcaggctcaatgccatacc

SEQ ID NO: 1272 - DNA, 30 bp, Artificial Sequence
  Synthetic primer
acgttggatgtgggagatgtagccgacctt

SEQ ID NO: 1273 - DNA, 30 bp, Artificial Sequence; identical to SEQ ID NO: 1271
  Synthetic primer

SEQ ID NO: 1274 - DNA, 30 bp, Artificial Sequence; identical to SEQ ID NO: 1272
  Synthetic primer

SEQ ID NO: 1275 - DNA, 30 bp, Artificial Sequence
  Synthetic primer
acgttggatggacaactttcctaggcactg

SEQ ID NO: 1276 - DNA, 30 bp, Artificial Sequence
  Synthetic primer
acgttggatgaaaggccaggatgtggacgg

SEQ ID NO: 1277 - DNA, 30 bp, Artificial Sequence
  Synthetic primer
acgttggatgtcctactctccagaggatac

SEQ ID NO: 1278 - DNA, 30 bp, Artificial Sequence
  Synthetic primer
acgttggatgagttcataccctaggtgacc

SEQ ID NO: 1279 - DNA, 30 bp, Artificial Sequence
  Synthetic primer
acgttggatgcccattgctccattctgttc

SEQ ID NO: 1280 - DNA, 30 bp, Artificial Sequence
  Synthetic primer
acgttggatgcatgagacacaactggacac

SEQ ID NO: 1281 - DNA, 30 bp, Artificial Sequence
  Synthetic primer
acgttggatggaatggagcaatgggctaac

SEQ ID NO: 1282 - DNA, 30 bp, Artificial Sequence
  Synthetic primer
acgttggatggcccaggttcttaaagcaac

SEQ ID NO: 1283 - DNA, 30 bp, Artificial Sequence
  Synthetic primer
acgttggatgtaaggatgtaactccagccc

SEQ ID NO: 1284 - DNA, 30 bp, Artificial Sequence
  Synthetic primer
acgttggatggttcaataaagggctaaggg

SEQ ID NO: 1285 - DNA, 30 bp, Artificial Sequence
  Synthetic primer
acgttggatggaggaaaggacagttacagg

SEQ ID NO: 1286 - DNA, 30 bp, Artificial Sequence
  Synthetic primer
acgttggatgggctggagttacatccttac

SEQ ID NO: 1287 - DNA, 30 bp, Artificial Sequence
  Synthetic primer
acgttggatgagtaatggtcacaggacctc

SEQ ID NO: 1288 - DNA, 30 bp, Artificial Sequence
  Synthetic primer
acgttggatgtgctcctctgagatggccag

SEQ ID NO: 1289 - DNA, 30 bp, Artificial Sequence
  Synthetic primer
acgttggatggatgaccttttctagtgccc

SEQ ID NO: 1290 - DNA, 30 bp, Artificial Sequence
  Synthetic primer
acgttggatgtcagaggagcagcagccatc

SEQ ID NO: 1291 - DNA, 30 bp, Artificial Sequence
  Synthetic primer
acgttggatgtagagaactgctctgcacac

SEQ ID NO: 1292 - DNA, 30 bp, Artificial Sequence
  Synthetic primer
acgttggatgctcacattccccgtgtttag

SEQ ID NO: 1293 - DNA, 30 bp, Artificial Sequence
  Synthetic primer
acgttggatgcatgcatctggaacctagag

SEQ ID NO: 1294 - DNA, 30 bp, Artificial Sequence
  Synthetic primer
acgttggatgactgcacttctgtaacggac

SEQ ID NO: 1295 - DNA, 30 bp, Artificial Sequence
  Synthetic primer
acgttggatgtagctcttcagaagagcagg

SEQ ID NO: 1296 - DNA, 30 bp, Artificial Sequence
  Synthetic primer
acgttggatggttctctaggttccagatgc

SEQ ID NO: 1297 - DNA, 30 bp, Artificial Sequence
  Synthetic primer
acgttggatgatgaaggaaccattgcccag

SEQ ID NO: 1298 - DNA, 30 bp, Artificial Sequence
  Synthetic primer
acgttggatgatggaacgctgagcttatcc

SEQ ID NO: 1299 - DNA, 30 bp, Artificial Sequence
  Synthetic primer
acgttggatgagcaccaggtgagggtcgca

SEQ ID NO: 1300 - DNA, 30 bp, Artificial Sequence
  Synthetic primer
acgttggatgagggaaggaaaggtcatgag

SEQ ID NO: 1301 - DNA, 30 bp, Artificial Sequence
  Synthetic primer
acgttggatgagcaccaaggccttgcacag

SEQ ID NO: 1302 - DNA, 30 bp, Artificial Sequence
  Synthetic primer
acgttggatgtctcatgacctttccttccc

SEQ ID NO: 1303 - DNA, 30 bp, Artificial Sequence
  Synthetic primer
acgttggatgtgaggaatgctgggcattag

SEQ ID NO: 1304 - DNA, 30 bp, Artificial Sequence
  Synthetic primer
acgttggatggagctctgcttccatatgtg

SEQ ID NO: 1305 - DNA, 30 bp, Artificial Sequence
  Synthetic primer
acgttggatgtgtctacctggagtgaacag

SEQ ID NO: 1306 - DNA, 30 bp, Artificial Sequence
  Synthetic primer
acgttggatggacccaaagcagagaaggag

SEQ ID NO: 1307 - DNA, 30 bp, Artificial Sequence
  Synthetic primer
acgttggatggataggtggagagagaatgg

SEQ ID NO: 1308 - DNA, 30 bp, Artificial Sequence
  Synthetic primer
acgttggatgcaaactccattcccacctac

SEQ ID NO: 1309 - DNA, 30 bp, Artificial Sequence
  Synthetic primer
acgttggatgcattctctctccacctatcc

SEQ ID NO: 1310 - DNA, 30 bp, Artificial Sequence
  Synthetic primer
acgttggatgagtcttggtggtttctgagc

SEQ ID NO: 1311 - DNA, 30 bp, Artificial Sequence
  Synthetic primer
acgttggatgtttagtcccgtcttcctcac

SEQ ID NO: 1312 - DNA, 30 bp, Artificial Sequence
  Synthetic primer
acgttggatggatgacttcactgaagaggc

SEQ ID NO: 1313 - DNA, 30 bp, Artificial Sequence
  Synthetic primer
acgttggatgcagaagctgaagacaacacc

SEQ ID NO: 1314 - DNA, 30 bp, Artificial Sequence
  Synthetic primer
acgttggatggagcattatgggctgttctc

SEQ ID NO: 1315 - DNA, 30 bp, Artificial Sequence
  Synthetic primer
acgttggatgaacacaggcgcttgaaaaag

SEQ ID NO: 1316 - DNA, 30 bp, Artificial Sequence
  Synthetic primer
acgttggatgctcttcccactctccattag

SEQ ID NO: 1317 - DNA, 30 bp, Artificial Sequence
  Synthetic primer
acgttggatgactcagcaggaacaaggtag

SEQ ID NO: 1318 - DNA, 31 bp, Artificial Sequence
  Synthetic primer
acgttggatgctatttttctcccgtgagtac

SEQ ID NO: 1319 - DNA, 30 bp, Artificial Sequence
  Synthetic primer
acgttggatgtgggaaggtttttaagggcc

SEQ ID NO: 1320 - DNA, 30 bp, Artificial Sequence
  Synthetic primer
acgttggatgagtcaactcagtactcacgg

SEQ ID NO: 1321 - DNA, 30 bp, Artificial Sequence
  Synthetic primer
acgttggatgccttcccatcactccaaatc

SEQ ID NO: 1322 - DNA, 30 bp, Artificial Sequence
  Synthetic primer
acgttggatgacagccttcagcagcagctc

SEQ ID NO: 1323 - DNA, 30 bp, Artificial Sequence
  Synthetic primer
acgttggatgatgggccctatgtctcagga

SEQ ID NO: 1324 - DNA, 30 bp, Artificial Sequence
  Synthetic primer
acgttggatgaaatcccaccccagtgcaag

SEQ ID NO: 1325 - DNA, 31 bp, Artificial Sequence
  Synthetic primer
acgttggatgaaggtagggtgtgagctgctg

SEQ ID NO: 1326 - DNA, 30 bp, Artificial Sequence
  Synthetic primer
acgttggatgaggatgctctttcccaggac

SEQ ID NO: 1327 - DNA, 30 bp, Artificial Sequence
  Synthetic primer
acgttggatgtagcctctggatctagaagg

SEQ ID NO: 1328 - DNA, 30 bp, Artificial Sequence
  Synthetic primer
acgttggatgtcctggacttcaagagtgag

SEQ ID NO: 1329 - DNA, 30 bp, Artificial Sequence
  Synthetic primer
acgttggatgaacagtagccaaacccctag

SEQ ID NO: 1330 - DNA, 30 bp, Artificial Sequence
  Synthetic primer
acgttggatgagaaggcgccagtgaaggac

SEQ ID NO: 1331 - DNA, 30 bp, Artificial Sequence
  Synthetic primer
acgttggatgtgagagaaggcactgagagg

SEQ ID NO: 1332 - DNA, 30 bp, Artificial Sequence
  Synthetic primer
acgttggatgaagcactaaagggccagtac

SEQ ID NO: 1333 - DNA, 30 bp, Artificial Sequence; identical to SEQ ID NO: 1331
  Synthetic primer

SEQ ID NO: 1334 - DNA, 30 bp, Artificial Sequence; identical to SEQ ID NO: 1332
  Synthetic primer

SEQ ID NO: 1335 - DNA, 30 bp, Artificial Sequence
  Synthetic primer
acgttggatgacagccagcaactgataacc

SEQ ID NO: 1336 - DNA, 30 bp, Artificial Sequence
  Synthetic primer
acgttggatgctgggaagatctcttcctgc

SEQ ID NO: 1337 - DNA, 30 bp, Artificial Sequence; identical to SEQ ID NO: 1335
  Synthetic primer

SEQ ID NO: 1338 - DNA, 30 bp, Artificial Sequence; identical to SEQ ID NO: 1336
  Synthetic primer

SEQ ID NO: 1339 - DNA, 30 bp, Artificial Sequence
  Synthetic primer
acgttggatgtctccaaggagagaagacag

SEQ ID NO: 1340 - DNA, 30 bp, Artificial Sequence
  Synthetic primer
acgttggatgttatcagttgctggctgtgc

SEQ ID NO: 1341 - DNA, 30 bp, Artificial Sequence
  Synthetic primer
acgttggatgttctccgcgcattgccacca

SEQ ID NO: 1342 - DNA, 30 bp, Artificial Sequence
  Synthetic primer
acgttggatgagtgcctctaccttgccctt

SEQ ID NO: 1343 - DNA, 30 bp, Artificial Sequence
  Synthetic primer
acgttggatgctagcttcttgggtgtgttg

SEQ ID NO: 1344 - DNA, 30 bp, Artificial Sequence
  Synthetic primer
acgttggatgtctgacagcccttccttgca

SEQ ID NO: 1345 - DNA, 30 bp, Artificial Sequence
  Synthetic primer
acgttggatgtactaaacaggtgaggctgg

SEQ ID NO: 1346 - DNA, 30 bp, Artificial Sequence
  Synthetic primer
acgttggatgttcccaggccagcgtgctgt

SEQ ID NO: 1347 - DNA, 30 bp, Artificial Sequence; identical to SEQ ID NO: 1346
  Synthetic primer

SEQ ID NO: 1348 - DNA, 30 bp, Artificial Sequence; identical to SEQ ID NO: 1345
  Synthetic primer

SEQ ID NO: 1349 - DNA, 30 bp, Artificial Sequence
  Synthetic primer
acgttggatgactcctgagtctaagaaggc

SEQ ID NO: 1350 - DNA, 30 bp, Artificial Sequence
  Synthetic primer
acgttggatgtcagtagtgctctgtttgcg

SEQ ID NO: 1351 - DNA, 30 bp, Artificial Sequence; identical to SEQ ID NO: 1349
  Synthetic primer

SEQ ID NO: 1352 - DNA, 30 bp, Artificial Sequence
  Synthetic primer
acgttggatgtctgtttgcgcccttcatgt

SEQ ID NO: 1353 - DNA, 30 bp, Artificial Sequence
  Synthetic primer
acgttggatgggtggccttcttagactatg

SEQ ID NO: 1354 - DNA, 30 bp, Artificial Sequence
  Synthetic primer
acgttggatgaagacacctggcttcagatg

SEQ ID NO: 1355 - DNA, 29 bp, Artificial Sequence
  Synthetic primer
acgttggatgagcagcgcaaacgggtctc

SEQ ID NO: 1356 - DNA, 30 bp, Artificial Sequence
  Synthetic primer
acgttggatgggaaacagctggtggccttc

SEQ ID NO: 1357 - DNA, 30 bp, Artificial Sequence
  Synthetic primer
acgttggatgccatcacagatgaggagatg

SEQ ID NO: 1358 - DNA, 30 bp, Artificial Sequence
  Synthetic primer
acgttggatgctatctggattggctgcatg

SEQ ID NO: 1359 - DNA, 30 bp, Artificial Sequence
  Synthetic primer
acgttggatgaagggtcccgaccataagtg

SEQ ID NO: 1360 - DNA, 30 bp, Artificial Sequence
  Synthetic primer
acgttggatgtagctgtatggagatggagg

SEQ ID NO: 1361 - DNA, 30 bp, Artificial Sequence
  Synthetic primer
acgttggatggattcctctctgagctcctg

SEQ ID NO: 1362 - DNA, 30 bp, Artificial Sequence
  Synthetic primer
acgttggatgtgtttccaggtggaacagac

SEQ ID NO: 1363 - DNA, 30 bp, Artificial Sequence
  Synthetic primer
acgttggatgctagatcagcaggtgggatt

SEQ ID NO: 1364 - DNA, 30 bp, Artificial Sequence
  Synthetic primer
acgttggatgtgaagacctgctatcccctg

SEQ ID NO: 1365 - DNA, 30 bp, Artificial Sequence
  Synthetic primer
acgttggatgccacctaccccataaacttg

SEQ ID NO: 1366 - DNA, 30 bp, Artificial Sequence
  Synthetic primer
acgttggatgatagtctgtgtgccgtactc

SEQ ID NO: 1367 - DNA, 30 bp, Artificial Sequence
  Synthetic primer
acgttggatgcccggtccttaatttgttcc

SEQ ID NO: 1368 - DNA, 30 bp, Artificial Sequence
  Synthetic primer
acgttggatgcacgcagagactgctactac

SEQ ID NO: 1369 - DNA, 31 bp, Artificial Sequence
  Synthetic primer
acgttggatgaggctagcctgggaagcagga

SEQ ID NO: 1370 - DNA, 30 bp, Artificial Sequence
  Synthetic primer
acgttggatggctagatgtggaagagccag

SEQ ID NO: 1371 - DNA, 30 bp, Artificial Sequence
  Synthetic primer
acgttggatggtacactgcaacagattcac

SEQ ID NO: 1372 - DNA, 30 bp, Artificial Sequence
  Synthetic primer
acgttggatggctgtagaacgatgagttgg

SEQ ID NO: 1373 - DNA, 30 bp, Artificial Sequence
  Synthetic primer
acgttggatgaagggaatgggaagcttctg

SEQ ID NO: 1374 - DNA, 30 bp, Artificial Sequence
  Synthetic primer
acgttggatgctagcttctggaagacagag

SEQ ID NO: 1375 - DNA, 30 bp, Artificial Sequence
  Synthetic primer
acgttggatgcaaacctccccttcaagatg

SEQ ID NO: 1376 - DNA, 30 bp, Artificial Sequence
  Synthetic primer
acgttggatgattgttgctgcccagtggac

SEQ ID NO: 1377 - DNA, 30 bp, Artificial Sequence
  Synthetic primer
acgttggatgaaccagcctcacctatctcc

SEQ ID NO: 1378 - DNA, 30 bp, Artificial Sequence
  Synthetic primer
acgttggatgcagggatgggagtgaagtag

SEQ ID NO: 1379 - DNA, 30 bp, Artificial Sequence
  Synthetic primer
acgttggatgatccaatgtcgtcctgcttg

SEQ ID NO: 1380 - DNA, 30 bp, Artificial Sequence
  Synthetic primer
acgttggatgaaggacatgagcatggagtg

SEQ ID NO: 1381 - DNA, 30 bp, Artificial Sequence; identical to SEQ ID NO: 1380
  Synthetic primer

SEQ ID NO: 1382 - DNA, 30 bp, Artificial Sequence; identical to SEQ ID NO: 1379
  Synthetic primer

SEQ ID NO: 1383 - DNA, 30 bp, Artificial Sequence
  Synthetic primer
acgttggatgaggaaccttggaagaatttg

SEQ ID NO: 1384 - DNA, 30 bp, Artificial Sequence
  Synthetic primer
acgttggatggtcttaacttctatactagc

SEQ ID NO: 1385 - DNA, 30 bp, Artificial Sequence
  Synthetic primer
acgttggatgactaagctgagatgtgaggc

SEQ ID NO: 1386 - DNA, 30 bp, Artificial Sequence
  Synthetic primer
acgttggatgcaccaaggtttcctcaatgc

SEQ ID NO: 1387 - DNA, 30 bp, Artificial Sequence
  Synthetic primer
acgttggatggatatctggtataatacccg

SEQ ID NO: 1388 - DNA, 30 bp, Artificial Sequence
  Synthetic primer
acgttggatgtcaggctgtatcctagtgag

SEQ ID NO: 1389 - DNA, 30 bp, Artificial Sequence
  Synthetic primer
acgttggatgagaaggcaaagatagggcag

SEQ ID NO: 1390 - DNA, 30 bp, Artificial Sequence
  Synthetic primer
acgttggatgcgactacagtctactaaacc

SEQ ID NO: 1391 - DNA, 30 bp, Artificial Sequence
  Synthetic primer
acgttggatgaagttcccctgtcctaagag

SEQ ID NO: 1392 - DNA, 30 bp, Artificial Sequence
  Synthetic primer
acgttggatgaaccaatcctcagggaacac

SEQ ID NO: 1393 - DNA, 30 bp, Artificial Sequence
  Synthetic primer
acgttggatgtaggaggaagggaaccaatc

SEQ ID NO: 1394 - DNA, 30 bp, Artificial Sequence
  Synthetic primer
acgttggatgaagagagctcacatgccaag

SEQ ID NO: 1395 - DNA, 30 bp, Artificial Sequence; identical to SEQ ID NO: 1391
  Synthetic primer

SEQ ID NO: 1396 - DNA, 30 bp, Artificial Sequence; identical to SEQ ID NO: 1392
  Synthetic primer

SEQ ID NO: 1397 - DNA, 30 bp, Artificial Sequence; identical to SEQ ID NO: 1392
  Synthetic primer

SEQ ID NO: 1398 - DNA, 30 bp, Artificial Sequence; identical to SEQ ID NO: 1391
  Synthetic primer

SEQ ID NO: 1399 - DNA, 30 bp, Artificial Sequence
  Synthetic primer
acgttggatgaaggtgacacagttgaaagc

SEQ ID NO: 1400 - DNA, 30 bp, Artificial Sequence
  Synthetic primer
acgttggatgtctagatagtctgggcaggg

SEQ ID NO: 1401 - DNA, 30 bp, Artificial Sequence
  Synthetic primer
acgttggatgtctaagccacaggcttccta

SEQ ID NO: 1402 - DNA, 30 bp, Artificial Sequence
  Synthetic primer
acgttggatggctattctctaagctctggg

SEQ ID NO: 1403 - DNA, 30 bp, Artificial Sequence
  Synthetic primer
acgttggatgtctctcttttcccctactcc

SEQ ID NO: 1404 - DNA, 30 bp, Artificial Sequence
  Synthetic primer
acgttggatggcagcacatgtactccaaag

SEQ ID NO: 1405 - DNA, 30 bp, Artificial Sequence
  Synthetic primer
acgttggatgtagagccccagaaagtgatg

SEQ ID NO: 1406 - DNA, 30 bp, Artificial Sequence
  Synthetic primer
acgttggatgcttgaaggtgatatgcgagg

SEQ ID NO: 1407 - DNA, 30 bp, Artificial Sequence; identical to SEQ ID NO: 1405
  Synthetic primer

SEQ ID NO: 1408 - DNA, 30 bp, Artificial Sequence; identical to SEQ ID NO: 1406
  Synthetic primer

SEQ ID NO: 1409 - DNA, 30 bp, Artificial Sequence
  Synthetic primer
acgttggatgattggttcagggtgggaaag

SEQ ID NO: 1410 - DNA, 30 bp, Artificial Sequence
  Synthetic primer
acgttggatgacccttctgcaccttctctc

SEQ ID NO: 1411 - DNA, 30 bp, Artificial Sequence
  Synthetic primer
acgttggatggtctcagcatcagcacgtac

SEQ ID NO: 1412 - DNA, 30 bp, Artificial Sequence
  Synthetic primer
acgttggatggtttctggaagtggagttgg

SEQ ID NO: 1413 - DNA, 30 bp, Artificial Sequence
  Synthetic primer
acgttggatgtggcaggacagagccaacag

SEQ ID NO: 1414 - DNA, 30 bp, Artificial Sequence
  Synthetic primer
acgttggatgtgctgcttctggcattgctg

SEQ ID NO: 1415 - DNA, 30 bp, Artificial Sequence
  Synthetic primer
acgttggatgaggcagcgctgcaggctatg

SEQ ID NO: 1416 - DNA, 29 bp, Artificial Sequence
  Synthetic primer
acgttggatggcccgcagccgttccagct

SEQ ID NO: 1417 - DNA, 30 bp, Artificial Sequence
  Synthetic primer
acgttggatgcacagcgagctccagataag

SEQ ID NO: 1418 - DNA, 30 bp, Artificial Sequence
  Synthetic primer
acgttggatgacttccttctcttggacctg

SEQ ID NO: 1419 - DNA, 30 bp, Artificial Sequence
  Synthetic primer
acgttggatgcacactcactctcagctgtg

SEQ ID NO: 1420 - DNA, 30 bp, Artificial Sequence
  Synthetic primer
acgttggatgccatcaggctgagactgaag

SEQ ID NO: 1421 - DNA, 30 bp, Artificial Sequence
  Synthetic primer
acgttggatgctcgattacagcagcttggg

SEQ ID NO: 1422 - DNA, 31 bp, Artificial Sequence
  Synthetic primer
acgttggatgtcactctcagctgtgtgctgg

SEQ ID NO: 1423 - DNA, 30 bp, Artificial Sequence
  Synthetic primer
acgttggatgaaggagctggaagaagagag

SEQ ID NO: 1424 - DNA, 30 bp, Artificial Sequence
  Synthetic primer
acgttggatgacttcagtctcagcctgatg

SEQ ID NO: 1425 - DNA, 30 bp, Artificial Sequence
  Synthetic primer
acgttggatggaacaccaggaacccaaatg

SEQ ID NO: 1426 - DNA, 30 bp, Artificial Sequence
  Synthetic primer
acgttggatgttgcaggtaggaatgcacag

SEQ ID NO: 1427 - DNA, 30 bp, Artificial Sequence
  Synthetic primer
acgttggatgcaagacttatctgaggaagg

SEQ ID NO: 1428 - DNA, 30 bp, Artificial Sequence
  Synthetic primer
acgttggatgaacctgcttactacttcccc

SEQ ID NO: 1429 - DNA, 30 bp, Artificial Sequence
  Synthetic primer
acgttggatggcacctacaataggctatgc

SEQ ID NO: 1430 - DNA, 30 bp, Artificial Sequence
  Synthetic primer
acgttggatgtagagcgagactctgtctca

SEQ ID NO: 1431 - DNA, 30 bp, Artificial Sequence
  Synthetic primer
acgttggatgggcaagtgagaatccccatc

SEQ ID NO: 1432 - DNA, 30 bp, Artificial Sequence
  Synthetic primer
acgttggatgataattggaggcatccagcc

SEQ ID NO: 1433 - DNA, 30 bp, Artificial Sequence
  Synthetic primer
acgttggatggggaagcagtgagaagagag

SEQ ID NO: 1434 - DNA, 30 bp, Artificial Sequence
  Synthetic primer
acgttggatgagctctccctgcattccttc

SEQ ID NO: 1435 - DNA, 30 bp, Artificial Sequence
  Synthetic primer
acgttggatgtgtccccatcttctctttcc

SEQ ID NO: 1436 - DNA, 30 bp, Artificial Sequence
  Synthetic primer
acgttggatgcagaactatgtgcacaaggg

SEQ ID NO: 1437 - DNA, 30 bp, Artificial Sequence
  Synthetic primer
acgttggatgtagtgcgcacttccatagac

SEQ ID NO: 1438 - DNA, 30 bp, Artificial Sequence
  Synthetic primer
acgttggatgcatatgcattggtaagcgcc

SEQ ID NO: 1439 - DNA, 30 bp, Artificial Sequence
  Synthetic primer
acgttggatgccctcaaaagctgttccctg

SEQ ID NO: 1440 - DNA, 30 bp, Artificial Sequence
  Synthetic primer
acgttggatgctgcagagatgtgctaagag

SEQ ID NO: 1441 - DNA, 30 bp, Artificial Sequence
  Synthetic primer
acgttggatggttctcaaattgcataaagg

SEQ ID NO: 1442 - DNA, 30 bp, Artificial Sequence
  Synthetic primer
acgttggatgtagaaggcacaggagctggg

SEQ ID NO: 1443 - DNA, 30 bp, Artificial Sequence
  Synthetic primer
acgttggatgtcacctgatgtcaggagttc

SEQ ID NO: 1444 - DNA, 30 bp, Artificial Sequence
  Synthetic primer
acgttggatgccaccacacctggctaattt

SEQ ID NO: 1445 - DNA, 30 bp, Artificial Sequence
  Synthetic primer
acgttggatgaaattagccaggtgtggtgg

SEQ ID NO: 1446 - DNA, 30 bp, Artificial Sequence
  Synthetic primer
acgttggatgaatctccacttcccgtgttc

SEQ ID NO: 1447 - DNA, 30 bp, Artificial Sequence
  Synthetic primer
acgttggatgctataacctccaactcctgg

SEQ ID NO: 1448 - DNA, 30 bp, Artificial Sequence
  Synthetic primer
acgttggatgaaaaatgagctgggtgtggc

SEQ ID NO: 1449 - DNA, 31 bp, Artificial Sequence
  Synthetic primer
acgttggatggaggaaaggatgagataaatg

SEQ ID NO: 1450 - DNA, 31 bp, Artificial Sequence
  Synthetic primer
acgttggatgctctgttcctatatgtgtttc

SEQ ID NO: 1451 - DNA, 30 bp, Artificial Sequence
  Synthetic primer
acgttggatgatgaagtgaaagttctgtgg

SEQ ID NO: 1452 - DNA, 32 bp, Artificial Sequence
  Synthetic primer
acgttggatgcgtagaaattattctctgttcc

SEQ ID NO: 1453 - DNA, 30 bp, Artificial Sequence
  Synthetic primer
acgttggatgtctagaagccaaacaggagg

SEQ ID NO: 1454 - DNA, 30 bp, Artificial Sequence
  Synthetic primer
acgttggatgaagagtcaccggaatagctc

SEQ ID NO: 1455 - DNA, 30 bp, Artificial Sequence; identical to SEQ ID NO: 1453
  Synthetic primer

SEQ ID NO: 1456 - DNA, 30 bp, Artificial Sequence; identical to SEQ ID NO: 1454
  Synthetic primer

SEQ ID NO: 1457 - DNA, 30 bp, Artificial Sequence
  Synthetic primer
acgttggatgtggtttccaggaagttcacc

SEQ ID NO: 1458 - DNA, 30 bp, Artificial Sequence
  Synthetic primer
acgttggatgtgtgcagataccaggcattc

SEQ ID NO: 1459 - DNA, 30 bp, Artificial Sequence
  Synthetic primer
acgttggatgctgtttccccgaacttcaag

SEQ ID NO: 1460 - DNA, 30 bp, Artificial Sequence
  Synthetic primer
acgttggatgcttgcaagggaaagagactc

SEQ ID NO: 1461 - DNA, 30 bp, Artificial Sequence
  Synthetic primer
acgttggatgtagcttcccgttcatctgtg

SEQ ID NO: 1462 - DNA, 30 bp, Artificial Sequence
  Synthetic primer
acgttggatgctgccaccctatttgcaaac

SEQ ID NO: 1463 - DNA, 30 bp, Artificial Sequence; identical to SEQ ID NO: 1462
  Synthetic primer

SEQ ID NO: 1464 - DNA, 30 bp, Artificial Sequence
  Synthetic primer
acgttggatgttgagccattccagatggtg

SEQ ID NO: 1465 - DNA, 30 bp, Artificial Sequence
  Synthetic primer
acgttggatgtggaactgcagttagctagg

SEQ ID NO: 1466 - DNA, 30 bp, Artificial Sequence
  Synthetic primer
acgttggatgaatactagtccctgggatcc

SEQ ID NO: 1467 - DNA, 30 bp, Artificial Sequence
  Synthetic primer
acgttggatgacatttcacctgagaacctc

SEQ ID NO: 1468 - DNA, 30 bp, Artificial Sequence
  Synthetic primer
acgttggatgatgttgtgactccttggctc

SEQ ID NO: 1469 - DNA, 30 bp, Artificial Sequence
  Synthetic primer
acgttggatggcagcactcatgaatgcaac

SEQ ID NO: 1470 - DNA, 30 bp, Artificial Sequence
  Synthetic primer
acgttggatggcacctactttattcctggc

SEQ ID NO: 1471 - DNA, 30 bp, Artificial Sequence
  Synthetic primer
acgttggatgtagtggaggcattttgccag

SEQ ID NO: 1472 - DNA, 30 bp, Artificial Sequence
  Synthetic primer
acgttggatggagggatgctttttactgag

SEQ ID NO: 1473 - DNA, 30 bp, Artificial Sequence; identical to SEQ ID NO: 1472
  Synthetic primer

SEQ ID NO: 1474 - DNA, 30 bp, Artificial Sequence; identical to SEQ ID NO: 1471
  Synthetic primer

SEQ ID NO: 1475 - DNA, 30 bp, Artificial Sequence
  Synthetic primer
acgttggatgaagggaaacttgtcagaggg

SEQ ID NO: 1476 - DNA, 30 bp, Artificial Sequence
  Synthetic primer
acgttggatgataagctgtgggagttgagg

SEQ ID NO: 1477 - DNA, 30 bp, Artificial Sequence
  Synthetic primer
acgttggatgcttggaggtaggcgatattg

SEQ ID NO: 1478 - DNA, 30 bp, Artificial Sequence
  Synthetic primer
acgttggatgaaggaagctggtctgcattg

SEQ ID NO: 1479 - DNA, 30 bp, Artificial Sequence
  Synthetic primer
acgttggatggtgtgttgtccttgggttag

SEQ ID NO: 1480 - DNA, 30 bp, Artificial Sequence
  Synthetic primer
acgttggatggcatcttgaatttttggccc

SEQ ID NO: 1481 - DNA, 30 bp, Artificial Sequence
  Synthetic primer
acgttggatgtgagtccctgataccagttc

SEQ ID NO: 1482 - DNA, 30 bp, Artificial Sequence
  Synthetic primer
acgttggatgaggccaaggatagactgaag

SEQ ID NO: 1483 - DNA, 30 bp, Artificial Sequence
  Synthetic primer
acgttggatgttagattgtttgccccaggc

SEQ ID NO: 1484 - DNA, 30 bp, Artificial Sequence
  Synthetic primer
acgttggatgtgataccagttcctaactgc

SEQ ID NO: 1485 - DNA, 30 bp, Artificial Sequence
  Synthetic primer
acgttggatgttcagtctatccttggcctg

SEQ ID NO: 1486 - DNA, 30 bp, Artificial Sequence
  Synthetic primer
acgttggatgccaagcataggtcagttgtc

SEQ ID NO: 1487 - DNA, 30 bp, Artificial Sequence
  Synthetic primer
acgttggatgaaaggaagggctctctgatg

SEQ ID NO: 1488 - DNA, 30 bp, Artificial Sequence
  Synthetic primer
acgttggatgtaatttcaggaaggagtgcc

SEQ ID NO: 1489 - DNA, 30 bp, Artificial Sequence
  Synthetic primer
acgttggatgcacagtgcagggacactatc

SEQ ID NO: 1490 - DNA, 30 bp, Artificial Sequence
  Synthetic primer
acgttggatgataagaggctgaggtaggtg

SEQ ID NO: 1491 - DNA, 30 bp, Artificial Sequence
  Synthetic primer
acgttggatgtgcgcctggcctaaaagttg

SEQ ID NO: 1492 - DNA, 30 bp, Artificial Sequence
  Synthetic primer
acgttggatgtcaatgatttctctacagac

SEQ ID NO: 1493 - DNA, 30 bp, Artificial Sequence
  Synthetic primer
acgttggatgaacaacttttaggccaggcg

SEQ ID NO: 1494 - DNA, 30 bp, Artificial Sequence
  Synthetic primer
acgttggatgtcaagcagtccttccacctc

SEQ ID NO: 1495 - DNA, 30 bp, Artificial Sequence
  Synthetic primer
acgttggatgctcaagcgatcttcccacgt

SEQ ID NO: 1496 - DNA, 30 bp, Artificial Sequence
  Synthetic primer
acgttggatgtttttagctgggtgaggtgg

SEQ ID NO: 1497 - DNA, 30 bp, Artificial Sequence
  Synthetic primer
acgttggatgtgaagctgcaactgcattcc

SEQ ID NO: 1498 - DNA, 31 bp, Artificial Sequence
  Synthetic primer
acgttggatgctgttttaactgggattcatc

SEQ ID NO: 1499 - DNA, 30 bp, Artificial Sequence
  Synthetic primer
acgttggatggtctcttcattttctgcagg

SEQ ID NO: 1500 - DNA, 30 bp, Artificial Sequence
  Synthetic primer
acgttggatgttggtcaggacaggtcattg

SEQ ID NO: 1501 - DNA, 30 bp, Artificial Sequence
  Synthetic primer
acgttggatgctgatcccagcacatataac

SEQ ID NO: 1502 - DNA, 30 bp, Artificial Sequence
  Synthetic primer
acgttggatgatagagtgaaagcctgtgtc

SEQ ID NO: 1503 - DNA, 30 bp, Artificial Sequence
  Synthetic primer
acgttggatgtcagaagtttgcaaccaccc

SEQ ID NO: 1504 - DNA, 30 bp, Artificial Sequence
  Synthetic primer
acgttggatgccaccacacccagctaattt

SEQ ID NO: 1505 - DNA, 30 bp, Artificial Sequence; identical to SEQ ID NO: 1503
  Synthetic primer

SEQ ID NO: 1506 - DNA, 30 bp, Artificial Sequence; identical to SEQ ID NO: 1504
  Synthetic primer

SEQ ID NO: 1507 - DNA, 30 bp, Artificial Sequence
  Synthetic primer
acgttggatggagctcagaagtttgcaacc

SEQ ID NO: 1508 - DNA, 30 bp, Artificial Sequence
  Synthetic primer
acgttggatgccacacccagctaatttttg

SEQ ID NO: 1509 - DNA, 30 bp, Artificial Sequence
  Synthetic primer
acgttggatgtctctgacccagggcaagtt

SEQ ID NO: 1510 - DNA, 30 bp, Artificial Sequence; identical to SEQ ID NO: 92
  Synthetic primer

SEQ ID NO: 1511 - DNA, 30 bp, Artificial Sequence
  Synthetic primer
acgttggatgtaatcccagcactttgggag

SEQ ID NO: 1512 - DNA, 30 bp, Artificial Sequence
  Synthetic primer
acgttggatgacaggtttttgccatgttgc

SEQ ID NO: 1513 - DNA, 30 bp, Artificial Sequence
  Synthetic primer
acgttggatggaccaaagtccctgcatatg

SEQ ID NO: 1514 - DNA, 30 bp, Artificial Sequence
  Synthetic primer
acgttggatgcagagcaagactcggtctaa

SEQ ID NO: 1515 - DNA, 30 bp, Artificial Sequence
  Synthetic primer
acgttggatgtgctgatttaatgtgaccag

SEQ ID NO: 1516 - DNA, 29 bp, Artificial Sequence
  Synthetic primer
acgttggatgcattttgcagataaagaaa

SEQ ID NO: 1517 - DNA, 30 bp, Artificial Sequence
  Synthetic primer
acgttggatgaggtggcagaatctcaatgg

SEQ ID NO: 1518 - DNA, 30 bp, Artificial Sequence
  Synthetic primer
acgttggatgggagatcccatgggacattt

SEQ ID NO: 1519 - DNA, 30 bp, Artificial Sequence
  Synthetic primer
acgttggatgacaccattcttgcccagaag

SEQ ID NO: 1520 - DNA, 30 bp, Artificial Sequence
  Synthetic primer
acgttggatgtggataggaaggaccaagag

SEQ ID NO: 1521 - DNA, 30 bp, Artificial Sequence
  Synthetic primer
acgttggatgagaaaccccagttgagtgtc

SEQ ID NO: 1522 - DNA, 30 bp, Artificial Sequence
  Synthetic primer
acgttggatggctgacaagactaaagctcg

SEQ ID NO: 1523 - DNA, 30 bp, Artificial Sequence
  Synthetic primer
acgttggatgtctcagcagatccttctgtg

SEQ ID NO: 1524 - DNA, 30 bp, Artificial Sequence
  Synthetic primer
acgttggatgagtacactgggtgatgctga

SEQ ID NO: 1525 - DNA, 30 bp, Artificial Sequence
  Synthetic primer
acgttggatggcctagccatgatttcctac

SEQ ID NO: 1526 - DNA, 28 bp, Artificial Sequence
  Synthetic primer
acgttggatgttgaccctctggtcctgc

SEQ ID NO: 1527 - DNA, 30 bp, Artificial Sequence
  Synthetic primer
acgttggatgtcggtgtttgcttgcatgtg

SEQ ID NO: 1528 - DNA, 30 bp, Artificial Sequence
  Synthetic primer
acgttggatggtgaaaaccctgatcttggg

SEQ ID NO: 1529 - DNA, 30 bp, Artificial Sequence
  Synthetic primer
acgttggatgtgcagccatgtattgtactg

SEQ ID NO: 1530 - DNA, 30 bp, Artificial Sequence
  Synthetic primer
acgttggatgtgtgtgaatatagtggtggg

SEQ ID NO: 1531 - DNA, 30 bp, Artificial Sequence
  Synthetic primer
acgttggatggaaagcaaccctttgctctg

SEQ ID NO: 1532 - DNA, 30 bp, Artificial Sequence
  Synthetic primer
acgttggatgatactcagaaacaggcgctg

SEQ ID NO: 1533 - DNA, 30 bp, Artificial Sequence
  Synthetic primer
acgttggatgttggttttcttctcagtctg

SEQ ID NO: 1534 - DNA, 30 bp, Artificial Sequence
  Synthetic primer
acgttggatgaaagaaagcagactcctggc

SEQ ID NO: 1535 - DNA, 30 bp, Artificial Sequence
  Synthetic primer
acgttggatgcagccatgtaggagaagcag

SEQ ID NO: 1536 - DNA, 29 bp, Artificial Sequence
  Synthetic primer
acgttggatgctgcagcccttaacagacg

SEQ ID NO: 1537 - DNA, 30 bp, Artificial Sequence
  Synthetic primer
acgttggatgactctgcttctcctacatgg

SEQ ID NO: 1538 - DNA, 30 bp, Artificial Sequence
  Synthetic primer
acgttggatggaagttcgctattcagtggg

SEQ ID NO: 1539 - DNA, 30 bp, Artificial Sequence
  Synthetic primer
acgttggatgctcctctctgctttctcttc

SEQ ID NO: 1540 - DNA, 30 bp, Artificial Sequence
  Synthetic primer
acgttggatgccttgaaacacacaggtagc

SEQ ID NO: 1541 - DNA, 30 bp, Artificial Sequence
  Synthetic primer
acgttggatgaagtgctgggattacaggtg

SEQ ID NO: 1542 - DNA, 30 bp, Artificial Sequence
  Synthetic primer
acgttggatgtaatgagggcacacaagagg

SEQ ID NO: 1543 - DNA, 30 bp, Artificial Sequence; identical to SEQ ID NO: 1541
  Synthetic primer

SEQ ID NO: 1544 - DNA, 30 bp, Artificial Sequence; identical to SEQ ID NO: 1542
  Synthetic primer

SEQ ID NO: 1545 - DNA, 30 bp, Artificial Sequence
  Synthetic primer
acgttggatgtaatcccagcactttgagag

SEQ ID NO: 1546 - DNA, 30 bp, Artificial Sequence
  Synthetic primer
acgttggatgagaactccgcctggctaatt

SEQ ID NO: 1547 - DNA, 30 bp, Artificial Sequence
  Synthetic primer
acgttggatggctgtgcctaggcaacatag

SEQ ID NO: 1548 - DNA, 30 bp, Artificial Sequence
  Synthetic primer
acgttggatgtacaggtgtgtgccaccatg

SEQ ID NO: 1549 - DNA, 30 bp, Artificial Sequence
  Synthetic primer
acgttggatggtcacaatcattggctacag

SEQ ID NO: 1550 - DNA, 31 bp, Artificial Sequence
  Synthetic primer
acgttggatggggactctgacactaaaaaag

SEQ ID NO: 1551 - DNA, 30 bp, Artificial Sequence; identical to SEQ ID NO: 1549
  Synthetic primer

SEQ ID NO: 1552 - DNA, 31 bp, Artificial Sequence; identical to SEQ ID NO: 1550
  Synthetic primer

SEQ ID NO: 1553 - DNA, 30 bp, Artificial Sequence
  Synthetic primer
acgttggatgaaggaattctcccaccctag

SEQ ID NO: 1554 - DNA, 30 bp, Artificial Sequence; identical to SEQ ID NO: 1549
  Synthetic primer

SEQ ID NO: 1555 - DNA, 30 bp, Artificial Sequence; identical to SEQ ID NO: 1553
  Synthetic primer

SEQ ID NO: 1556 - DNA, 30 bp, Artificial Sequence; identical to SEQ ID NO: 1549
  Synthetic primer

SEQ ID NO: 1557 - DNA, 30 bp, Artificial Sequence
  Synthetic primer
acgttggatgtttagtgtcagagtcccagc

SEQ ID NO: 1558 - DNA, 30 bp, Artificial Sequence
  Synthetic primer
acgttggatgggcatgatctctgctcattc

SEQ ID NO: 1559 - DNA, 30 bp, Artificial Sequence
  Synthetic primer
acgttggatgggtacctacttcattaaggg

SEQ ID NO: 1560 - DNA, 30 bp, Artificial Sequence
  Synthetic primer
acgttggatgagctaatgcttactgagtgc

SEQ ID NO: 1561 - DNA, 30 bp, Artificial Sequence
  Synthetic primer
acgttggatgcctacaatctaactcctccc

SEQ ID NO: 1562 - DNA, 30 bp, Artificial Sequence
  Synthetic primer
acgttggatgcatcagtctgcctctctaga

SEQ ID NO: 1563 - DNA, 30 bp, Artificial Sequence
  Synthetic primer
acgttggatgtccctacaatctaactcctc

SEQ ID NO: 1564 - DNA, 30 bp, Artificial Sequence
  Synthetic primer
acgttggatgtttactttagggtccagctc

SEQ ID NO: 1565 - DNA, 30 bp, Artificial Sequence
  Synthetic primer
acgttggatgggaggagttagattgtaggg

SEQ ID NO: 1566 - DNA, 30 bp, Artificial Sequence
  Synthetic primer
acgttggatgagggcaagactccatctcaa

SEQ ID NO: 1567 - DNA, 30 bp, Artificial Sequence
  Synthetic primer
acgttggatgtctggccaccagagaatgac

SEQ ID NO: 1568 - DNA, 30 bp, Artificial Sequence
  Synthetic primer
acgttggatgtacagcaatgagccttggtc

SEQ ID NO: 1569 - DNA, 31 bp, Artificial Sequence
  Synthetic primer
acgttggatgggagaattgcttgaatcctgg

SEQ ID NO: 1570 - DNA, 30 bp, Artificial Sequence
  Synthetic primer
acgttggatgttgttacccagggtgtagtg

SEQ ID NO: 1571 - DNA, 30 bp, Artificial Sequence
  Synthetic primer
acgttggatggaagaaatctgaggctcagg

SEQ ID NO: 1572 - DNA, 30 bp, Artificial Sequence
  Synthetic primer
acgttggatgatagggacaaggtagacaac

SEQ ID NO: 1573 - DNA, 30 bp, Artificial Sequence
  Synthetic primer
acgttggatgaagaatcacatgaacccggg

SEQ ID NO: 1574 - DNA, 30 bp, Artificial Sequence
  Synthetic primer
acgttggatgttcaagatggagtctcgctc

SEQ ID NO: 1575 - DNA, 30 bp, Artificial Sequence
  Synthetic primer
acgttggatggccgtgtgcttttcctcatg

SEQ ID NO: 1576 - DNA, 30 bp, Artificial Sequence
  Synthetic primer
acgttggatgtgaggtcgtgccattgtact

SEQ ID NO: 1577 - DNA, 30 bp, Artificial Sequence; identical to SEQ ID NO: 1575
  Synthetic primer

SEQ ID NO: 1578 - DNA, 30 bp, Artificial Sequence; identical to SEQ ID NO: 1576
  Synthetic primer

SEQ ID NO: 1579 - DNA, 30 bp, Artificial Sequence
  Synthetic primer
acgttggatgtgaggatccgagagctttac

SEQ ID NO: 1580 - DNA, 30 bp, Artificial Sequence
  Synthetic primer
acgttggatgcatccctcctagtacaagac

SEQ ID NO: 1581 - DNA, 30 bp, Artificial Sequence
  Synthetic primer
acgttggatgttaccatggcctcattgtcc

SEQ ID NO: 1582 - DNA, 30 bp, Artificial Sequence
  Synthetic primer
acgttggatggaagcctcagacttaccaac

SEQ ID NO: 1583 - DNA, 30 bp, Artificial Sequence
  Synthetic primer
acgttggatgtttttgagacagggtcttgc

SEQ ID NO: 1584 - DNA, 30 bp, Artificial Sequence
  Synthetic primer
acgttggatgagaagtttgaggttgcagcg

SEQ ID NO: 1585 - DNA, 30 bp, Artificial Sequence
  Synthetic primer
acgttggatgcaagtagctgctgctacaac

SEQ ID NO: 1586 - DNA, 30 bp, Artificial Sequence
  Synthetic primer
acgttggatgtagcgagacttcatcgctac

SEQ ID NO: 1587 - DNA, 30 bp, Artificial Sequence
  Synthetic primer
acgttggatgatgaagtctcgctatgttgc

SEQ ID NO: 1588 - DNA, 30 bp, Artificial Sequence
  Synthetic primer
acgttggatgacactttgggaggtcaatgc

SEQ ID NO: 1589 - DNA, 30 bp, Artificial Sequence
  Synthetic primer
acgttggatgcgctcctttaaaccagtacc

SEQ ID NO: 1590 - DNA, 30 bp, Artificial Sequence
  Synthetic primer
acgttggatgtggggagctaaagagaacac

SEQ ID NO: 1591 - DNA, 30 bp, Artificial Sequence
  Synthetic primer
acgttggatgttggagacttgttccctctg

SEQ ID NO: 1592 - DNA, 30 bp, Artificial Sequence
  Synthetic primer
acgttggatgttgcactgcattctgtaaag

SEQ ID NO: 1593 - DNA, 30 bp, Artificial Sequence
  Synthetic primer
acgttggatgtacatcttcagtacagatgc

SEQ ID NO: 1594 - DNA, 30 bp, Artificial Sequence
  Synthetic primer
acgttggatgccacatgtgtggattcaacc

SEQ ID NO: 1595 - DNA, 30 bp, Artificial Sequence
  Synthetic primer
acgttggatggtctctgccttgcatagatc

SEQ ID NO: 1596 - DNA, 30 bp, Artificial Sequence
  Synthetic primer
acgttggatgaacaggaatccccagagatc

SEQ ID NO: 1597 - DNA, 30 bp, Artificial Sequence
  Synthetic primer
acgttggatgagctgtggaatctcaagcag

SEQ ID NO: 1598 - DNA, 30 bp, Artificial Sequence
  Synthetic primer
acgttggatggaaagacagtgacaccaatg

SEQ ID NO: 1599 - DNA, 30 bp, Artificial Sequence
  Synthetic primer
acgttggatgctgaagtctcagctactcag

SEQ ID NO: 1600 - DNA, 30 bp, Artificial Sequence
  Synthetic primer
acgttggatgaatcgtagctcactgaagcc

SEQ ID NO: 1601 - DNA, 30 bp, Artificial Sequence; identical to SEQ ID NO: 1511
  Synthetic primer

SEQ ID NO: 1602 - DNA, 30 bp, Artificial Sequence
  Synthetic primer
acgttggatgttttactatgttggccaggc

SEQ ID NO: 1603 - DNA, 30 bp, Artificial Sequence
  Synthetic primer
acgttggatgattactggcatgagccatcg

SEQ ID NO: 1604 - DNA, 30 bp, Artificial Sequence
  Synthetic primer
acgttggatggattatcagtttggcttgcc

SEQ ID NO: 1605 - DNA, 30 bp, Artificial Sequence
  Synthetic primer
acgttggatgtccagcctaagaaacagagc

SEQ ID NO: 1606 - DNA, 30 bp, Artificial Sequence
  Synthetic primer
acgttggatgaccgcacccagcttagtttt

SEQ ID NO: 1607 - DNA, 30 bp, Artificial Sequence
  Synthetic primer
acgttggatgaaaacaaactaagctgggtg

SEQ ID NO: 1608 - DNA, 30 bp, Artificial Sequence
  Synthetic primer
acgttggatgagagacagggtttcactatg

SEQ ID NO: 1609 - DNA, 30 bp, Artificial Sequence; identical to SEQ ID NO: 1608
  Synthetic primer

SEQ ID NO: 1610 - DNA, 30 bp, Artificial Sequence; identical to SEQ ID NO: 1607
  Synthetic primer

SEQ ID NO: 1611 - DNA, 30 bp, Artificial Sequence
  Synthetic primer
acgttggatgacttgccaggattaggagtg

SEQ ID NO: 1612 - DNA, 30 bp, Artificial Sequence
  Synthetic primer
acgttggatgagctgcttccaactcaactg

SEQ ID NO: 1613 - DNA, 30 bp, Artificial Sequence
  Synthetic primer
acgttggatgatgtgagcacagctagctac

SEQ ID NO: 1614 - DNA, 30 bp, Artificial Sequence
  Synthetic primer
acgttggatgttgtttggagagctcctggg

SEQ ID NO: 1615 - DNA, 30 bp, Artificial Sequence
  Synthetic primer
acgttggatgatatgttctgcaacttgccc

SEQ ID NO: 1616 - DNA, 30 bp, Artificial Sequence
  Synthetic primer
acgttggatgtgctggtatggaaacatgtc

SEQ ID NO: 1617 - DNA, 30 bp, Artificial Sequence; identical to SEQ ID NO: 1616
  Synthetic primer

SEQ ID NO: 1618 - DNA, 30 bp, Artificial Sequence; identical to SEQ ID NO: 1615
  Synthetic primer

SEQ ID NO: 1619 - DNA, 30 bp, Artificial Sequence
  Synthetic primer
acgttggatgctcctggtagctgggactaa

SEQ ID NO: 1620 - DNA, 30 bp, Artificial Sequence
  Synthetic primer
acgttggatggaacagtttgggcaacatgg

SEQ ID NO: 1621 - DNA, 30 bp, Artificial Sequence
  Synthetic primer
acgttggatggtggcacattcttacatagg

SEQ ID NO: 1622 - DNA, 30 bp, Artificial Sequence
  Synthetic primer
acgttggatgcaaagtgctgggattacagg

SEQ ID NO: 1623 - DNA, 30 bp, Artificial Sequence
  Synthetic primer
acgttggatgtccagatgtagcaaaatggg

SEQ ID NO: 1624 - DNA, 30 bp, Artificial Sequence
  Synthetic primer
acgttggatgtggctggcaattccttaaac

SEQ ID NO: 1625 - DNA, 30 bp, Artificial Sequence
  Synthetic primer
acgttggatgatttgggaatatctgttgac

SEQ ID NO: 1626 - DNA, 30 bp, Artificial Sequence
  Synthetic primer
acgttggatgcaagctaatatttctctagg

SEQ ID NO: 1627 - DNA, 30 bp, Artificial Sequence
  Synthetic primer
acgttggatgattgcaggcatgagccactg

SEQ ID NO: 1628 - DNA, 30 bp, Artificial Sequence
  Synthetic primer
acgttggatgcagagtgagactccatgtcg

SEQ ID NO: 1629 - DNA, 30 bp, Artificial Sequence
  Synthetic primer
acgttggatgatttgggagagaatgcgagg

SEQ ID NO: 1630 - DNA, 30 bp, Artificial Sequence
  Synthetic primer
acgttggatggtggaggaactcagtgtaac

SEQ ID NO: 1631 - DNA, 30 bp, Artificial Sequence
  Synthetic primer
acgttggatgtctttttaatttctcctcgc

SEQ ID NO: 1632 - DNA, 30 bp, Artificial Sequence
  Synthetic primer
acgttggatgttcgtggagagtatgatagc

SEQ ID NO: 1633 - DNA, 30 bp, Artificial Sequence
  Synthetic primer
acgttggatggctatcatactctccacgaa

SEQ ID NO: 1634 - DNA, 30 bp, Artificial Sequence
  Synthetic primer
acgttggatgggtttcaccatgttggccag

SEQ ID NO: 1635 - DNA, 30 bp, Artificial Sequence
  Synthetic primer
acgttggatgaggtgaaaggattgcttgag

SEQ ID NO: 1636 - DNA, 30 bp, Artificial Sequence
  Synthetic primer
acgttggatgcaccaccatgcctagctaat

SEQ ID NO: 1637 - DNA, 30 bp, Artificial Sequence
  Synthetic primer
acgttggatgtcaagtgatcctctcacatc

SEQ ID NO: 1638 - DNA, 30 bp, Artificial Sequence
  Synthetic primer
acgttggatgcaacatagtgagacctcatc

SEQ ID NO: 1639 - DNA, 30 bp, Artificial Sequence
  Synthetic primer
acgttggatgcagcttattatggcttcagc

SEQ ID NO: 1640 - DNA, 30 bp, Artificial Sequence
  Synthetic primer
acgttggatgtatagtcccagctactcagg

SEQ ID NO: 1641 - DNA, 30 bp, Artificial Sequence
  Synthetic primer
acgttggatgaaatagctgggcatgatggc

SEQ ID NO: 1642 - DNA, 30 bp, Artificial Sequence
  Synthetic primer
acgttggatgatcttcccgctttagcttcc

SEQ ID NO: 1643 - DNA, 30 bp, Artificial Sequence
  Synthetic primer
acgttggatgaatgacatggggaaatactc

SEQ ID NO: 1644 - DNA, 29 bp, Artificial Sequence
  Synthetic primer
acgttggatgcacccagcctatatcctgc

SEQ ID NO: 1645 - DNA, 30 bp, Artificial Sequence
  Synthetic primer
acgttggatgttcaaaaatggggccatacc

SEQ ID NO: 1646 - DNA, 30 bp, Artificial Sequence
  Synthetic primer
acgttggatgagagtgagaccctgtctcaa

SEQ ID NO: 1647 - DNA, 30 bp, Artificial Sequence
  Synthetic primer
acgttggatggtactgtaagaaccaggacc

SEQ ID NO: 1648 - DNA, 30 bp, Artificial Sequence
  Synthetic primer
acgttggatggcccggtcttgtctattctt

SEQ ID NO: 1649 - DNA, 30 bp, Artificial Sequence
  Synthetic primer
acgttggatgctgccactttaagaggactg

SEQ ID NO: 1650 - DNA, 30 bp, Artificial Sequence
  Synthetic primer
acgttggatgtcttctttccctcattgccc

SEQ ID NO: 1651 - DNA, 30 bp, Artificial Sequence
  Synthetic primer
acgttggatggtttgactactggacttggg

SEQ ID NO: 1652 - DNA, 30 bp, Artificial Sequence
  Synthetic primer
acgttggatgtctgatcacccagctgtgac

SEQ ID NO: 1653 - DNA, 31 bp, Artificial Sequence
  Synthetic primer
acgttggatggattctgtgactaagttactg

SEQ ID NO: 1654 - DNA, 30 bp, Artificial Sequence
  Synthetic primer
acgttggatgtagcatctcttaactctttc

SEQ ID NO: 1655 - DNA, 30 bp, Artificial Sequence
  Synthetic primer
acgttggatgagcctggtcaaaagattctg

SEQ ID NO: 1656 - DNA, 30 bp, Artificial Sequence; identical to SEQ ID NO: 1654
  Synthetic primer

SEQ ID NO: 1657 - DNA, 30 bp, Artificial Sequence
  Synthetic primer
acgttggatggataatggagaaaactggcc

SEQ ID NO: 1658 - DNA, 30 bp, Artificial Sequence
  Synthetic primer
acgttggatgagtctgggtgacagagagag

SEQ ID NO: 1659 - DNA, 30 bp, Artificial Sequence
  Synthetic primer
acgttggatgttgaagatttcttccagggc

SEQ ID NO: 1660 - DNA, 31 bp, Artificial Sequence
  Synthetic primer
acgttggatggggcaagacatgtacaatatc

SEQ ID NO: 1661 - DNA, 30 bp, Artificial Sequence
  Synthetic primer
acgttggatgagatcctgctcaggacaaag

SEQ ID NO: 1662 - DNA, 30 bp, Artificial Sequence
  Synthetic primer
acgttggatgtccaccaggaggtaagtcaa

SEQ ID NO: 1663 - DNA, 30 bp, Artificial Sequence
  Synthetic primer
acgttggatggaaaatgagagtggtgtggg

SEQ ID NO: 1664 - DNA, 30 bp, Artificial Sequence
  Synthetic primer
acgttggatgctgccctgttaggatttcag

SEQ ID NO: 1665 - DNA, 30 bp, Artificial Sequence
  Synthetic primer
acgttggatgtgggacccaggcacactcca

SEQ ID NO: 1666 - DNA, 30 bp, Artificial Sequence
  Synthetic primer
acgttggatgcttgagctcaggagttccag

SEQ ID NO: 1667 - DNA, 31 bp, Artificial Sequence
  Synthetic primer
acgttggatggaaatacttgctgaaataggg

SEQ ID NO: 1668 - DNA, 30 bp, Artificial Sequence
  Synthetic primer
acgttggatgacattttgccaaatttgctg

SEQ ID NO: 1669 - DNA, 30 bp, Artificial Sequence
  Synthetic primer
acgttggatgactacctaaggaaactgggc

SEQ ID NO: 1670 - DNA, 30 bp, Artificial Sequence
  Synthetic primer
acgttggatgctactatacccctcatgagc

SEQ ID NO: 1671 - DNA, 30 bp, Artificial Sequence
  Synthetic primer
acgttggatgaaccaaggtaaagggttggc

SEQ ID NO: 1672 - DNA, 30 bp, Artificial Sequence
  Synthetic primer
acgttggatgctacagccatcagatacctc

SEQ ID NO: 1673 - DNA, 30 bp, Artificial Sequence; identical to SEQ ID NO: 1622
  Synthetic primer

SEQ ID NO: 1674 - DNA, 30 bp, Artificial Sequence
  Synthetic primer
acgttggatgtttctagacagctcctcctc

SEQ ID NO: 1675 - DNA, 30 bp, Artificial Sequence
  Synthetic primer
acgttggatgagtagctgggactacaggca

SEQ ID NO: 1676 - DNA, 30 bp, Artificial Sequence
  Synthetic primer
acgttggatgaggagatagagaccacggtg

SEQ ID NO: 1677 - DNA, 30 bp, Artificial Sequence; identical to SEQ ID NO: 1675
  Synthetic primer

SEQ ID NO: 1678 - DNA, 30 bp, Artificial Sequence; identical to SEQ ID NO: 1676
  Synthetic primer

SEQ ID NO: 1679 - DNA, 30 bp, Artificial Sequence
  Synthetic primer
acgttggatgataatggcctctcctctacc

SEQ ID NO: 1680 - DNA, 30 bp, Artificial Sequence
  Synthetic primer
acgttggatgagcgagaccctgtctcaaaa

SEQ ID NO: 1681 - DNA, 29 bp, Artificial Sequence
  Synthetic primer
acgttggatgattacaggcctgatccacc

SEQ ID NO: 1682 - DNA, 30 bp, Artificial Sequence
  Synthetic primer
acgttggatgtagaacttagctcacagagc

SEQ ID NO: 1683 - DNA, 30 bp, Artificial Sequence
  Synthetic primer
acgttggatgcctcctgggttcaagcgatt

SEQ ID NO: 1684 - DNA, 30 bp, Artificial Sequence
  Synthetic primer
acgttggatgagaccagactggccaacatg

SEQ ID NO: 1685 - DNA, 30 bp, Artificial Sequence
  Synthetic primer
acgttggatgtctctctatcacccagactg

SEQ ID NO: 1686 - DNA, 30 bp, Artificial Sequence
  Synthetic primer
acgttggatgttgaacctgggaggtggaag

SEQ ID NO: 1687 - DNA, 30 bp, Artificial Sequence
  Synthetic primer
acgttggatgaatcacttgagcccgagagg

SEQ ID NO: 1688 - DNA, 29 bp, Artificial Sequence
  Synthetic primer
acgttggatgatggagtctcactctgtcg

SEQ ID NO: 1689 - DNA, 30 bp, Artificial Sequence
  Synthetic primer
acgttggatgagatggagtctcactctgtc

SEQ ID NO: 1690 - DNA, 30 bp, Artificial Sequence
  Synthetic primer
acgttggatgacaggagaatcacttgagcc

SEQ ID NO: 1691 - DNA, 30 bp, Artificial Sequence
  Synthetic primer
acgttggatgggtagatttggagctgagag

SEQ ID NO: 1692 - DNA, 30 bp, Artificial Sequence
  Synthetic primer
acgttggatgatatgcctagaagtgctcag

SEQ ID NO: 1693 - DNA, 30 bp, Artificial Sequence
  Synthetic primer
acgttggatgaacagaagttggttcttccc

SEQ ID NO: 1694 - DNA, 30 bp, Artificial Sequence
  Synthetic primer
acgttggatggccttacttagctgatgctg

SEQ ID NO: 1695 - DNA, 30 bp, Artificial Sequence
  Synthetic primer
acgttggatgttattctccaggctggagtc

SEQ ID NO: 1696 - DNA, 30 bp, Artificial Sequence
  Synthetic primer
acgttggatgaggcaggagaatcgcttgaa

SEQ ID NO: 1697 - DNA, 30 bp, Artificial Sequence
  Synthetic primer
acgttggatgagcatgagaaatcttttggg

SEQ ID NO: 1698 - DNA, 30 bp, Artificial Sequence
  Synthetic primer
acgttggatgctacacctgtaaacagcagc

SEQ ID NO: 1699 - DNA, 30 bp, Artificial Sequence
  Synthetic primer
acgttggatgtctcagatctcatgcgtaac

SEQ ID NO: 1700 - DNA, 30 bp, Artificial Sequence
  Synthetic primer
acgttggatgccagaagttaacacagaaag

SEQ ID NO: 1701 - DNA, 31 bp, Artificial Sequence
  Synthetic primer
acgttggatgcccaatcattacctctttacc

SEQ ID NO: 1702 - DNA, 30 bp, Artificial Sequence
  Synthetic primer
acgttggatgatgtagacgacagaatgagg

SEQ ID NO: 1703 - DNA, 30 bp, Artificial Sequence
  Synthetic primer
acgttggatgggagaatggtgtgaacctgg

SEQ ID NO: 1704 - DNA, 30 bp, Artificial Sequence
  Synthetic primer
acgttggatgagatggagtctcactctgtt

SEQ ID NO: 1705 - DNA, 31 bp, Artificial Sequence
  Synthetic primer
acgttggatggatcattcccaaagtcaatcc

SEQ ID NO: 1706 - DNA, 31 bp, Artificial Sequence
  Synthetic primer
acgttggatgcatgcccagctacaaaataat

SEQ ID NO: 1707 - DNA, 30 bp, Artificial Sequence
  Synthetic primer
acgttggatgcataccaaaaggtgttgtcc

SEQ ID NO: 1708 - DNA, 30 bp, Artificial Sequence
  Synthetic primer
acgttggatgagagatggattgactttggg

SEQ ID NO: 1709 - DNA, 30 bp, Artificial Sequence
  Synthetic primer
acgttggatgtaaaataccagatggcaggc

SEQ ID NO: 1710 - DNA, 30 bp, Artificial Sequence
  Synthetic primer
acgttggatgaactcttgacctcgtgatcc

SEQ ID NO: 1711 - DNA, 30 bp, Artificial Sequence
  Synthetic primer
acgttggatgtttgggtttatgggttgggc

SEQ ID NO: 1712 - DNA, 30 bp, Artificial Sequence
  Synthetic primer
acgttggatgactgaccagtccaagacaac

SEQ ID NO: 1713 - DNA, 30 bp, Artificial Sequence
  Synthetic primer
acgttggatggttgtatcttgttcgccgtg

SEQ ID NO: 1714 - DNA, 30 bp, Artificial Sequence
  Synthetic primer
acgttggatggcactcacagaacgactaag

SEQ ID NO: 1715 - DNA, 30 bp, Artificial Sequence
  Synthetic primer
acgttggatgactaagaaccttcctgctcg

SEQ ID NO: 1716 - DNA, 30 bp, Artificial Sequence
  Synthetic primer
acgttggatgtctgtcccatgtgagtgttg

SEQ ID NO: 1717 - DNA, 30 bp, Artificial Sequence
  Synthetic primer
acgttggatgaacactcacatgggacagac

SEQ ID NO: 1718 - DNA, 30 bp, Artificial Sequence
  Synthetic primer
acgttggatggggtggttcttaagcatccc

SEQ ID NO: 1719 - DNA, 30 bp, Artificial Sequence
  Synthetic primer
acgttggatgtgaggtagaaggatcgcttg

SEQ ID NO: 1720 - DNA, 30 bp, Artificial Sequence
  Synthetic primer
acgttggatgtggagtgtagttgcgtgatc

SEQ ID NO: 1721 - DNA, 30 bp, Artificial Sequence
  Synthetic primer
acgttggatgttctgagggcgtttctgatc

SEQ ID NO: 1722 - DNA, 30 bp, Artificial Sequence
  Synthetic primer
acgttggatgccccaacgcaaacataaagc

SEQ ID NO: 1723 - DNA, 30 bp, Artificial Sequence
  Synthetic primer
acgttggatgcgctactcaaagctctacag

SEQ ID NO: 1724 - DNA, 30 bp, Artificial Sequence
  Synthetic primer
acgttggatggaaagcactgggtaggttac

SEQ ID NO: 1725 - DNA, 31 bp, Artificial Sequence
  Synthetic primer
acgttggatggtctcattgtcttagtctctc

SEQ ID NO: 1726 - DNA, 31 bp, Artificial Sequence
  Synthetic primer
acgttggatggctggaatgaatttcagatcc

SEQ ID NO: 1727 - DNA, 30 bp, Artificial Sequence
  Synthetic primer
acgttggatgaaaaaaaaattgggggtggg

SEQ ID NO: 1728 - DNA, 30 bp, Artificial Sequence
  Synthetic primer
acgttggatgtatttgcgcactgcaaccag

SEQ ID NO: 1729 - DNA, 30 bp, Artificial Sequence
  Synthetic primer
acgttggatgtactgttcactctctacccc

SEQ ID NO: 1730 - DNA, 30 bp, Artificial Sequence
  Synthetic primer
acgttggatgcaagagcgaaactctgtctc

SEQ ID NO: 1731 - DNA, 30 bp, Artificial Sequence
  Synthetic primer
acgttggatgattacagcaacctcatggcc

SEQ ID NO: 1732 - DNA, 30 bp, Artificial Sequence
  Synthetic primer
acgttggatgatagtgccggcaagtagtag

SEQ ID NO: 1733 - DNA, 30 bp, Artificial Sequence; identical to SEQ ID NO: 1732
  Synthetic primer

SEQ ID NO: 1734 - DNA, 30 bp, Artificial Sequence; identical to SEQ ID NO: 1731
  Synthetic primer

SEQ ID NO: 1735 - DNA, 30 bp, Artificial Sequence
  Synthetic primer
acgttggatggattgccatggtagcactcg

SEQ ID NO: 1736 - DNA, 30 bp, Artificial Sequence
  Synthetic primer
acgttggatgccctgctggtgtttatggac

SEQ ID NO: 1737 - DNA, 30 bp, Artificial Sequence
  Synthetic primer
acgttggatgaagattcaacctggctcctg

SEQ ID NO: 1738 - DNA, 30 bp, Artificial Sequence
  Synthetic primer
acgttggatgtgcatttggctagactgcag

SEQ ID NO: 1739 - DNA, 30 bp, Artificial Sequence
  Synthetic primer
acgttggatgttctgtcaacttgggattgg

SEQ ID NO: 1740 - DNA, 30 bp, Artificial Sequence
  Synthetic primer
acgttggatgattgttgtagactattaccc

SEQ ID NO: 1741 - DNA, 30 bp, Artificial Sequence
  Synthetic primer
acgttggatgagaccagcctaagcaacatg

SEQ ID NO: 1742 - DNA, 30 bp, Artificial Sequence
  Synthetic primer
acgttggatgttagcttcctgagtagctgg

SEQ ID NO: 1743 - DNA, 30 bp, Artificial Sequence
  Synthetic primer
acgttggatgtgatcagctggagggttatg

SEQ ID NO: 1744 - DNA, 30 bp, Artificial Sequence
  Synthetic primer
acgttggatgatggcttcagctggtatctc

SEQ ID NO: 1745 - DNA, 30 bp, Artificial Sequence
  Synthetic primer
acgttggatgcatttcttctggtcaggcac

SEQ ID NO: 1746 - DNA, 30 bp, Artificial Sequence
  Synthetic primer
acgttggatgagtccacaccttgttcacag

SEQ ID NO: 1747 - DNA, 30 bp, Artificial Sequence
  Synthetic primer
acgttggatgttttgtgtagcaccagctcc

SEQ ID NO: 1748 - DNA, 30 bp, Artificial Sequence
  Synthetic primer
acgttggatgtttaaccagcttcttggggc

SEQ ID NO: 1749 - DNA, 30 bp, Artificial Sequence
  Synthetic primer
acgttggatgttaggaactgcactgggttg

SEQ ID NO: 1750 - DNA, 30 bp, Artificial Sequence
  Synthetic primer
acgttggatgttggtaccccagagttatgc

SEQ ID NO: 1751 - DNA, 30 bp, Artificial Sequence
  Synthetic primer
acgttggatgagaagctcatcccacttcag

SEQ ID NO: 1752 - DNA, 30 bp, Artificial Sequence
  Synthetic primer
acgttggatgggtaccaacccagtatttac

SEQ ID NO: 1753 - DNA, 30 bp, Artificial Sequence
  Synthetic primer
acgttggatgctgttgtaggtgctgaagtg

SEQ ID NO: 1754 - DNA, 30 bp, Artificial Sequence
  Synthetic primer
acgttggatgctggctgtctactacagaac

SEQ ID NO: 1755 - DNA, 30 bp, Artificial Sequence
  Synthetic primer
acgttggatgtaatacaaaggtggcagcag

SEQ ID NO: 1756 - DNA, 30 bp, Artificial Sequence
  Synthetic primer
acgttggatgttgacaaggataaggacaag

SEQ ID NO: 1757 - DNA, 30 bp, Artificial Sequence
  Synthetic primer
acgttggatggagactgtcttgatacccac

SEQ ID NO: 1758 - DNA, 30 bp, Artificial Sequence
  Synthetic primer
acgttggatgcaggccctcaaggatttgtt

SEQ ID NO: 1759 - DNA, 30 bp, Artificial Sequence
  Synthetic primer
acgttggatgatagccccctgtttcctttc

SEQ ID NO: 1760 - DNA, 31 bp, Artificial Sequence
  Synthetic primer
acgttggatgggagagtgagaggtttttttc

SEQ ID NO: 1761 - DNA, 30 bp, Artificial Sequence
  Synthetic primer
acgttggatggggacagagttgcctaaaac

SEQ ID NO: 1762 - DNA, 30 bp, Artificial Sequence
  Synthetic primer
acgttggatgctgtggcagcctggatatac

SEQ ID NO: 1763 - DNA, 30 bp, Artificial Sequence
  Synthetic primer
acgttggatgttcctaatcctgcttccctc

SEQ ID NO: 1764 - DNA, 30 bp, Artificial Sequence
  Synthetic primer
acgttggatgctgctaccttatcacatggg

SEQ ID NO: 1765 - DNA, 30 bp, Artificial Sequence
  Synthetic primer
acgttggatggaattcctaatcctgcttcc

SEQ ID NO: 1766 - DNA, 30 bp, Artificial Sequence
  Synthetic primer
acgttggatgctgtgtcattctgtttcagg

SEQ ID NO: 1767 - DNA, 30 bp, Artificial Sequence
  Synthetic primer
acgttggatgtgcttcagtggaatggcaag

SEQ ID NO: 1768 - DNA, 30 bp, Artificial Sequence
  Synthetic primer
acgttggatgaaaccagcctccattcactc

SEQ ID NO: 1769 - DNA, 30 bp, Artificial Sequence
  Synthetic primer
acgttggatggccttggaggagcttatatg

SEQ ID NO: 1770 - DNA, 30 bp, Artificial Sequence
  Synthetic primer
acgttggatgctcttctgtgctgctacaac

SEQ ID NO: 1771 - DNA, 31 bp, Artificial Sequence
  Synthetic primer
acgttggatgcactttgatatcctgtctctc

SEQ ID NO: 1772 - DNA, 30 bp, Artificial Sequence
  Synthetic primer
acgttggatgatcactgtatatccagtacc

SEQ ID NO: 1773 - DNA, 30 bp, Artificial Sequence
  Synthetic primer
acgttggatgagctgagtagatgatagcac

SEQ ID NO: 1774 - DNA, 30 bp, Artificial Sequence
  Synthetic primer
acgttggatgggaaagagagacaggatatc

SEQ ID NO: 1775 - DNA, 30 bp, Artificial Sequence
  Synthetic primer
acgttggatgccccctaaagccaaaaaagc

SEQ ID NO: 1776 - DNA, 30 bp, Artificial Sequence
  Synthetic primer
acgttggatgtccttggctcctcatttacc

SEQ ID NO: 1777 - DNA, 30 bp, Artificial Sequence
  Synthetic primer
acgttggatgaagtgctgggattacaggcg

SEQ ID NO: 1778 - DNA, 30 bp, Artificial Sequence
  Synthetic primer
acgttggatgctccctgtcggaaaaatggg

SEQ ID NO: 1779 - DNA, 30 bp, Artificial Sequence
  Synthetic primer
acgttggatggaaaccccgcctctactaaa

SEQ ID NO: 1780 - DNA, 30 bp, Artificial Sequence
  Synthetic primer
acgttggatgaagtgattctcctgcctcag

SEQ ID NO: 1781 - DNA, 30 bp, Artificial Sequence; identical to SEQ ID NO: 1779
  Synthetic primer

SEQ ID NO: 1782 - DNA, 30 bp, Artificial Sequence; identical to SEQ ID NO: 1780
  Synthetic primer

SEQ ID NO: 1783 - DNA, 30 bp, Artificial Sequence
  Synthetic primer
acgttggatgagcctctgatgtaccagttg

SEQ ID NO: 1784 - DNA, 30 bp, Artificial Sequence
  Synthetic primer
acgttggatgtggcaacagagtgagactcc

SEQ ID NO: 1785 - DNA, 30 bp, Artificial Sequence
  Synthetic primer
acgttggatgtacctcttccacaggagaac

SEQ ID NO: 1786 - DNA, 30 bp, Artificial Sequence
  Synthetic primer
acgttggatgacaactggtacatcagaggc

SEQ ID NO: 1787 - DNA, 30 bp, Artificial Sequence
  Synthetic primer
acgttggatgagcatgatgctctgtcttcc

SEQ ID NO: 1788 - DNA, 30 bp, Artificial Sequence
  Synthetic primer
acgttggatgcccttcactgaagacctttc

SEQ ID NO: 1789 - DNA, 30 bp, Artificial Sequence
  Synthetic primer
acgttggatggtcatacagtatggctgtgg

SEQ ID NO: 1790 - DNA, 30 bp, Artificial Sequence
  Synthetic primer
acgttggatgtgggcagagaaggaagaatg

SEQ ID NO: 1791 - DNA, 30 bp, Artificial Sequence
  Synthetic primer
acgttggatggaccctagtagtcctaaagg

SEQ ID NO: 1792 - DNA, 30 bp, Artificial Sequence
  Synthetic primer
acgttggatgcttctcatctgctcaacagc

SEQ ID NO: 1793 - DNA, 30 bp, Artificial Sequence
  Synthetic primer
acgttggatgtttttgagacggagtctcgc

SEQ ID NO: 1794 - DNA, 31 bp, Artificial Sequence
  Synthetic primer
acgttggatgtgaacctggaaggcggagttt

SEQ ID NO: 1795 - DNA, 30 bp, Artificial Sequence
  Synthetic primer
acgttggatgcctggctaacatggtgaaac

SEQ ID NO: 1796 - DNA, 30 bp, Artificial Sequence
  Synthetic primer
acgttggatgggactataggcacctactac

SEQ ID NO: 1797 - DNA, 30 bp, Artificial Sequence
  Synthetic primer
acgttggatgttatctaactctctgggccc

SEQ ID NO: 1798 - DNA, 30 bp, Artificial Sequence
  Synthetic primer
acgttggatgcctggtactctgtgaagagt

SEQ ID NO: 1799 - DNA, 30 bp, Artificial Sequence
  Synthetic primer
acgttggatgaggcagctttgattcttggg

SEQ ID NO: 1800 - DNA, 30 bp, Artificial Sequence
  Synthetic primer
acgttggatgtggtctgctttctctctcca

SEQ ID NO: 1801 - DNA, 30 bp, Artificial Sequence
  Synthetic primer
acgttggatgtatcgagggtgacaaaccaa

SEQ ID NO: 1802 - DNA, 31 bp, Artificial Sequence
  Synthetic primer
acgttggatggtctggatgagcttgaatttg

SEQ ID NO: 1803 - DNA, 30 bp, Artificial Sequence
  Synthetic primer
acgttggatggacctagggagatccccttc

SEQ ID NO: 1804 - DNA, 30 bp, Artificial Sequence
  Synthetic primer
acgttggatgtgagcaccaagtcagggaga

SEQ ID NO: 1805 - DNA, 30 bp, Artificial Sequence
  Synthetic primer
acgttggatgtgaggccaacagagagggtg

SEQ ID NO: 1806 - DNA, 30 bp, Artificial Sequence
  Synthetic primer
acgttggatgtggagataccagtttgggtg

SEQ ID NO: 1807 - DNA, 30 bp, Artificial Sequence
  Synthetic primer
acgttggatgtgaagacataccaggctctg

SEQ ID NO: 1808 - DNA, 30 bp, Artificial Sequence
  Synthetic primer
acgttggatgggtagaaccttttgggactg

SEQ ID NO: 1809 - DNA, 30 bp, Artificial Sequence
  Synthetic primer
acgttggatgttctaccctcacttgctcag

SEQ ID NO: 1810 - DNA, 30 bp, Artificial Sequence
  Synthetic primer
acgttggatgacagtaccctaacctgctac

SEQ ID NO: 1811 - DNA, 30 bp, Artificial Sequence
  Synthetic primer
acgttggatgactgcggcttatacagtacc

SEQ ID NO: 1812 - DNA, 30 bp, Artificial Sequence
  Synthetic primer
acgttggatgttctagccttcctcttctcc

SEQ ID NO: 1813 - DNA, 30 bp, Artificial Sequence
  Synthetic primer
acgttggatgggatcccaaactgtacaacc

SEQ ID NO: 1814 - DNA, 30 bp, Artificial Sequence
  Synthetic primer
acgttggatgggatagctgcttatgcctac

SEQ ID NO: 1815 - DNA, 30 bp, Artificial Sequence
  Synthetic primer
acgttggatggatgaggcttacctgggctg

SEQ ID NO: 1816 - DNA, 30 bp, Artificial Sequence
  Synthetic primer
acgttggatggggtgctgaccaagagagag

SEQ ID NO: 1817 - DNA, 30 bp, Artificial Sequence
  Synthetic primer
acgttggatgtcatgtcagccctgtttacc

SEQ ID NO: 1818 - DNA, 30 bp, Artificial Sequence
  Synthetic primer
acgttggatgagactcaatctaggcccatc

SEQ ID NO: 1819 - DNA, 30 bp, Artificial Sequence
  Synthetic primer
acgttggatgtctcttccatccttgccaag

SEQ ID NO: 1820 - DNA, 30 bp, Artificial Sequence
  Synthetic primer
acgttggatgtgtactcatgctgctccatg

SEQ ID NO: 1821 - DNA, 30 bp, Artificial Sequence
  Synthetic primer
acgttggatgcctttagatcccagtgcttg

SEQ ID NO: 1822 - DNA, 30 bp, Artificial Sequence
  Synthetic primer
acgttggatgctaggacctggcaaagaaag

SEQ ID NO: 1823 - DNA, 30 bp, Artificial Sequence
  Synthetic primer
acgttggatgcaagaacagccttcctcatc

SEQ ID NO: 1824 - DNA, 30 bp, Artificial Sequence
  Synthetic primer
acgttggatgtagggctttgtctggactcg

SEQ ID NO: 1825 - DNA, 30 bp, Artificial Sequence
  Synthetic primer
acgttggatgaacagcgccattgttgtttg

SEQ ID NO: 1826 - DNA, 30 bp, Artificial Sequence
  Synthetic primer
acgttggatgtatgaacccagggtttgagg

SEQ ID NO: 1827 - DNA, 30 bp, Artificial Sequence
  Synthetic primer
acgttggatgttggtgagtcagcattagcc

SEQ ID NO: 1828 - DNA, 30 bp, Artificial Sequence
  Synthetic primer
acgttggatgcataaagagcaagagtgccc

SEQ ID NO: 1829 - DNA, 30 bp, Artificial Sequence
  Synthetic primer
acgttggatgatggagccagctttccttag

SEQ ID NO: 1830 - DNA, 30 bp, Artificial Sequence
  Synthetic primer
acgttggatgcacccttcctccctaaatac

SEQ ID NO: 1831 - DNA, 30 bp, Artificial Sequence
  Synthetic primer
acgttggatgccatgtactttatccatggg

SEQ ID NO: 1832 - DNA, 30 bp, Artificial Sequence
  Synthetic primer
acgttggatgcttagcacagacatagcagc

SEQ ID NO: 1833 - DNA, 30 bp, Artificial Sequence
  Synthetic primer
acgttggatgaacccacactaatatgacgg

SEQ ID NO: 1834 - DNA, 30 bp, Artificial Sequence
  Synthetic primer
acgttggatgcgttacagtttacaaagggc

SEQ ID NO: 1835 - DNA, 29 bp, Artificial Sequence
  Synthetic primer
acgttggatgtgggtgagtgagcagctag

SEQ ID NO: 1836 - DNA, 30 bp, Artificial Sequence
  Synthetic primer
acgttggatggatttctggagtaaggctgg

SEQ ID NO: 1837 - DNA, 30 bp, Artificial Sequence
  Synthetic primer
acgttggatggctttcctgctgtcttccac

SEQ ID NO: 1838 - DNA, 30 bp, Artificial Sequence
  Synthetic primer
acgttggatgaagggtcaagtgaatgtgtt

SEQ ID NO: 1839 - DNA, 30 bp, Artificial Sequence
  Synthetic primer
acgttggatgaaaagcaggaccaggcatcg

SEQ ID NO: 1840 - DNA, 30 bp, Artificial Sequence
  Synthetic primer
acgttggatgtaggtcatacagtgtgtcgg

SEQ ID NO: 1841 - DNA, 30 bp, Artificial Sequence
  Synthetic primer
acgttggatgaacccttaaagagctccagc

SEQ ID NO: 1842 - DNA, 30 bp, Artificial Sequence
  Synthetic primer
acgttggatggtgacaccaatgaatgacgg

SEQ ID NO: 1843 - DNA, 30 bp, Artificial Sequence
  Synthetic primer
acgttggatgttagggaaggaagtgtgccg

SEQ ID NO: 1844 - DNA, 30 bp, Artificial Sequence
  Synthetic primer
acgttggatgtaaacgagaccgtagtgctg

SEQ ID NO: 1845 - DNA, 30 bp, Artificial Sequence
  Synthetic primer
acgttggatgacagtccagggaagccaaac

SEQ ID NO: 1846 - DNA, 31 bp, Artificial Sequence
  Synthetic primer
acgttggatggtcaaaactcaacaagcaacc

SEQ ID NO: 1847 - DNA, 30 bp, Artificial Sequence
  Synthetic primer
acgttggatgagcttgcagtgatccgagat

SEQ ID NO: 1848 - DNA, 30 bp, Artificial Sequence
  Synthetic primer
acgttggatggtgttgttcatggtcaatgg

SEQ ID NO: 1849 - DNA, 30 bp, Artificial Sequence
  Synthetic primer
acgttggatgtccttcttctttactgggtc

SEQ ID NO: 1850 - DNA, 30 bp, Artificial Sequence
  Synthetic primer
acgttggatgtccttgcaccagagctaatc

SEQ ID NO: 1851 - DNA, 30 bp, Artificial Sequence
  Synthetic primer
acgttggatgcagggccttacctccattct

SEQ ID NO: 1852 - DNA, 30 bp, Artificial Sequence
  Synthetic primer
acgttggatgtcctagacaaagccttgtgc

SEQ ID NO: 1853 - DNA, 30 bp, Artificial Sequence
  Synthetic primer
acgttggatgaggagtgagactctagacag

SEQ ID NO: 1854 - DNA, 30 bp, Artificial Sequence
  Synthetic primer
acgttggatgagcttccctgggcatctaaa

SEQ ID NO: 1855 - DNA, 30 bp, Artificial Sequence
  Synthetic primer
acgttggatgactggagaaatccaagaggg

SEQ ID NO: 1856 - DNA, 30 bp, Artificial Sequence
  Synthetic primer
acgttggatgctccaccaacagcgctgtag

SEQ ID NO: 1857 - DNA, 30 bp, Artificial Sequence
  Synthetic primer
acgttggatgcatcacttgaccctaggtgc

SEQ ID NO: 1858 - DNA, 30 bp, Artificial Sequence
  Synthetic primer
acgttggatgtcttgggaagtcactctagg

SEQ ID NO: 1859 - DNA, 30 bp, Artificial Sequence; identical to SEQ ID NO: 1857
  Synthetic primer

SEQ ID NO: 1860 - DNA, 30 bp, Artificial Sequence; identical to SEQ ID NO: 1858
  Synthetic primer

SEQ ID NO: 1861 - DNA, 30 bp, Artificial Sequence
  Synthetic primer
acgttggatgacaaggcaggtaagacaagc

SEQ ID NO: 1862 - DNA, 30 bp, Artificial Sequence
  Synthetic primer
acgttggatgctcaggttttctgagtcctg

SEQ ID NO: 1863 - DNA, 30 bp, Artificial Sequence
  Synthetic primer
acgttggatgtccctgggcatctaaacctc

SEQ ID NO: 1864 - DNA, 30 bp, Artificial Sequence; identical to SEQ ID NO: 1853
  Synthetic primer

SEQ ID NO: 1865 - DNA, 30 bp, Artificial Sequence
  Synthetic primer
acgttggatgcaggatgcagaaaacctgag

SEQ ID NO: 1866 - DNA, 30 bp, Artificial Sequence; identical to SEQ ID NO: 1857
  Synthetic primer

SEQ ID NO: 1867 - DNA, 21 bp, Artificial Sequence
  Synthetic primer
aaatctctttttctgttgagt

SEQ ID NO: 1868 - DNA, 17 bp, Artificial Sequence
  Synthetic primer
ctgcactccagcctggg

SEQ ID NO: 1869 - DNA, 17 bp, Artificial Sequence
  Synthetic primer
gaactcctgagctcaaa

SEQ ID NO: 1870 - DNA, 17 bp, Artificial Sequence
  Synthetic primer
agctctattctccaggg

SEQ ID NO: 1871 - DNA, 17 bp, Artificial Sequence
  Synthetic primer
tcctgaccacatgatcc

SEQ ID NO: 1872 - DNA, 17 bp, Artificial Sequence
  Synthetic primer
ccacacccatctgtgtc

SEQ ID NO: 1873 - DNA, 22 bp, Artificial Sequence
  Synthetic primer
aattaagtggtgtaagatcaat

SEQ ID NO: 1874 - DNA, 18 bp, Artificial Sequence
  Synthetic primer
caccggagtaattttcag

SEQ ID NO: 1875 - DNA, 17 bp, Artificial Sequence
  Synthetic primer
ttagtccttgcctcccc

SEQ ID NO: 1876 - DNA, 19 bp, Artificial Sequence
  Synthetic primer
ggcaaactatgaccaaatc

SEQ ID NO: 1877 - DNA, 17 bp, Artificial Sequence
  Synthetic primer
ttggtcatagtttgccc

SEQ ID NO: 1878 - DNA, 17 bp, Artificial Sequence
  Synthetic primer
agaaggcccaaaggcta

SEQ ID NO: 1879 - DNA, 21 bp, Artificial Sequence
  Synthetic primer
cctaacagatagtttttcaac

SEQ ID NO: 1880 - DNA, 19 bp, Artificial Sequence
  Synthetic primer
cacttttgtaattctggca

SEQ ID NO: 1881 - DNA, 17 bp, Artificial Sequence
  Synthetic primer
tgcgtttctcagattgg

SEQ ID NO: 1882 - DNA, 22 bp, Artificial Sequence
  Synthetic primer
tcaaattgaaaacagtacattg

SEQ ID NO: 1883 - DNA, 20 bp, Artificial Sequence
  Synthetic primer
tttggaattagacagtgaaa

SEQ ID NO: 1884 - DNA, 18 bp, Artificial Sequence
  Synthetic primer
gtaactcattaccccttc

SEQ ID NO: 1885 - DNA, 17 bp, Artificial Sequence
  Synthetic primer
tcctgagtggcccaagc

SEQ ID NO: 1886 - DNA, 17 bp, Artificial Sequence
  Synthetic primer
gccactcaggacccctc

SEQ ID NO: 1887 - DNA, 18 bp, Artificial Sequence
  Synthetic primer
agttgtcccaaaacaaat

SEQ ID NO: 1888 - DNA, 18 bp, Artificial Sequence
  Synthetic primer
ccatattccctagaaacc

SEQ ID NO: 1889 - DNA, 17 bp, Artificial Sequence
  Synthetic primer
ctcctagggatgtcagc

SEQ ID NO: 1890 - DNA, 17 bp, Artificial Sequence
  Synthetic primer
ggaaggcaggtggtggc

SEQ ID NO: 1891 - DNA, 17 bp, Artificial Sequence
  Synthetic primer
gcttctcttccccagct

SEQ ID NO: 1892 - DNA, 18 bp, Artificial Sequence
  Synthetic primer
gtccaaagctcttttcat

SEQ ID NO: 1893 - DNA, 17 bp, Artificial Sequence
  Synthetic primer
accccaggcagccttgc

SEQ ID NO: 1894 - DNA, 17 bp, Artificial Sequence
  Synthetic primer
catcctaggttcctcac

SEQ ID NO: 1895 - DNA, 17 bp, Artificial Sequence
  Synthetic primer
cccttccctcctgttag

SEQ ID NO: 1896 - DNA, 17 bp, Artificial Sequence
  Synthetic primer
caggctacccactcccc

SEQ ID NO: 1897 - DNA, 17 bp, Artificial Sequence
  Synthetic primer
tcccaggctacccactc

SEQ ID NO: 1898 - DNA, 17 bp, Artificial Sequence
  Synthetic primer
ggaccacttcaggctca

SEQ ID NO: 1899 - DNA, 17 bp, Artificial Sequence
  Synthetic primer
gataccagactgggatc

SEQ ID NO: 1900 - DNA, 17 bp, Artificial Sequence
  Synthetic primer
tagacctcaccctaccc

SEQ ID NO: 1901 - DNA, 17 bp, Artificial Sequence
  Synthetic primer
ccttcactccaaggcaa

SEQ ID NO: 1902 - DNA, 18 bp, Artificial Sequence
  Synthetic primer
gagatgtctgggttctag

SEQ ID NO: 1903 - DNA, 17 bp, Artificial Sequence
  Synthetic primer
cagcggctctggagaca

SEQ ID NO: 1904 - DNA, 17 bp, Artificial Sequence
  Synthetic primer
ccttggttgcagtggac

SEQ ID NO: 1905 - DNA, 17 bp, Artificial Sequence
  Synthetic primer
tgggagcccaggtgaca

SEQ ID NO: 1906 - DNA, 17 bp, Artificial Sequence
  Synthetic primer
acgtccgttacagaagt

SEQ ID NO: 1907 - DNA, 17 bp, Artificial Sequence
  Synthetic primer
cctagagaactgctctg

SEQ ID NO: 1908 - DNA, 17 bp, Artificial Sequence
  Synthetic primer
tgctctgctgtgccctc

SEQ ID NO: 1909 - DNA, 17 bp, Artificial Sequence
  Synthetic primer
tgctgaagttggggaag

SEQ ID NO: 1910 - DNA, 17 bp, Artificial Sequence
  Synthetic primer
caggtgggtgggaagga

SEQ ID NO: 1911 - DNA, 17 bp, Artificial Sequence
  Synthetic primer
ctgtgctcccacgttcc

SEQ ID NO: 1912 - DNA, 17 bp, Artificial Sequence
  Synthetic primer
attagttcacaggctgc

SEQ ID NO: 1913 - DNA, 17 bp, Artificial Sequence
  Synthetic primer
tgtaggctgcgtggatg

SEQ ID NO: 1914 - DNA, 17 bp, Artificial Sequence
  Synthetic primer
agagagaatggcaggag

SEQ ID NO: 1915 - DNA, 17 bp, Artificial Sequence
  Synthetic primer
ccattagccttcctaac

SEQ ID NO: 1916 - DNA, 17 bp, Artificial Sequence
  Synthetic primer
gaacgctcaagcctggt

SEQ ID NO: 1917 - DNA, 18 bp, Artificial Sequence
  Synthetic primer
caggggaacacaggcgct

SEQ ID NO: 1918 - DNA, 19 bp, Artificial Sequence
  Synthetic primer
aaagaaaagagagaacagc

SEQ ID NO: 1919 - DNA, 17 bp, Artificial Sequence
  Synthetic primer
ttcccacaccgatcaag

SEQ ID NO: 1920 - DNA, 17 bp, Artificial Sequence
  Synthetic primer
ccggggatggatctttt

SEQ ID NO: 1921 - DNA, 17 bp, Artificial Sequence
  Synthetic primer
cccaccccagtgcaagt

SEQ ID NO: 1922 - DNA, 17 bp, Artificial Sequence
  Synthetic primer
ccttcagcagcagctca

SEQ ID NO: 1923 - DNA, 17 bp, Artificial Sequence
  Synthetic primer
accccactcctgagaca

SEQ ID NO: 1924 - DNA, 19 bp, Artificial Sequence
  Synthetic primer
gatctagaagggaccataa

SEQ ID NO: 1925 - DNA, 17 bp, Artificial Sequence
  Synthetic primer
caaacccctagagacag

SEQ ID NO: 1926 - DNA, 17 bp, Artificial Sequence
  Synthetic primer
ggcggaggaccaggtga

SEQ ID NO: 1927 - DNA, 17 bp, Artificial Sequence
  Synthetic primer
cggaggaccaggtgagg

SEQ ID NO: 1928 - DNA, 17 bp, Artificial Sequence
  Synthetic primer
tggggctcacaagggag

SEQ ID NO: 1929 - DNA, 17 bp, Artificial Sequence
  Synthetic primer
ataaccctggggctcac

SEQ ID NO: 1930 - DNA, 17 bp, Artificial Sequence
  Synthetic primer
attctcatggagagcac

SEQ ID NO: 1931 - DNA, 17 bp, Artificial Sequence
  Synthetic primer
gccaccaccacagccag

SEQ ID NO: 1932 - DNA, 17 bp, Artificial Sequence
  Synthetic primer
gttgaggatgctgaagg

SEQ ID NO: 1933 - DNA, 17 bp, Artificial Sequence
  Synthetic primer
gcgggaccttgctgata

SEQ ID NO: 1934 - DNA, 17 bp, Artificial Sequence
  Synthetic primer
tgctgtgccacgctcta

SEQ ID NO: 1935 - DNA, 18 bp, Artificial Sequence
  Synthetic primer
cccacgccccatgactcc

SEQ ID NO: 1936 - DNA, 19 bp, Artificial Sequence
  Synthetic primer
ggccaccagctgtttccca

SEQ ID NO: 1937 - DNA, 20 bp, Artificial Sequence
  Synthetic primer
ggacagttaggcagacagta

SEQ ID NO: 1938 - DNA, 19 bp, Artificial Sequence
  Synthetic primer
aaacgggtctccctagagc

SEQ ID NO: 1939 - DNA, 18 bp, Artificial Sequence
  Synthetic primer
gacccccaagagaccctg

SEQ ID NO: 1940 - DNA, 17 bp, Artificial Sequence
  Synthetic primer
cgagtgtagagttctgg

SEQ ID NO: 1941 - DNA, 17 bp, Artificial Sequence
  Synthetic primer
gagctcctgcctacccc

SEQ ID NO: 1942 - DNA, 17 bp, Artificial Sequence
  Synthetic primer
caggtgggattccaagg

SEQ ID NO: 1943 - DNA, 17 bp, Artificial Sequence
  Synthetic primer
ccataaacttgaagccc

SEQ ID NO: 1944 - DNA, 17 bp, Artificial Sequence
  Synthetic primer
caagccttggcaggtga

SEQ ID NO: 1945 - DNA, 19 bp, Artificial Sequence
  Synthetic primer
ctgggaagcaggagcagac

SEQ ID NO: 1946 - DNA, 18 bp, Artificial Sequence
  Synthetic primer
gtcttccagaagctagat

SEQ ID NO: 1947 - DNA, 17 bp, Artificial Sequence
  Synthetic primer
agtgccagggactgtac

SEQ ID NO: 1948 - DNA, 17 bp, Artificial Sequence
  Synthetic primer
acaaaggcaagggcctg

SEQ ID NO: 1949 - DNA, 18 bp, Artificial Sequence
  Synthetic primer
cacctatctcccagcgcc

SEQ ID NO: 1950 - DNA, 20 bp, Artificial Sequence
  Synthetic primer
caccaagcttcctgaacagc

SEQ ID NO: 1951 - DNA, 19 bp, Artificial Sequence
  Synthetic primer
tggagtggggtgtggttag

SEQ ID NO: 1952 - DNA, 23 bp, Artificial Sequence
  Synthetic primer
aagaatttgaaactgaagagtac

SEQ ID NO: 1953 - DNA, 17 bp, Artificial Sequence
  Synthetic primer
aggcccattggagaccg

SEQ ID NO: 1954 - DNA, 20 bp, Artificial Sequence
  Synthetic primer
tggtataatacccgtttttc

SEQ ID NO: 1955 - DNA, 17 bp, Artificial Sequence
  Synthetic primer
gatgtggactgaagggc

SEQ ID NO: 1956 - DNA, 17 bp, Artificial Sequence
  Synthetic primer
ccaagtgccttagagta

SEQ ID NO: 1957 - DNA, 19 bp, Artificial Sequence
  Synthetic primer
acccaggtgcagagcctta

SEQ ID NO: 1958 - DNA, 17 bp, Artificial Sequence
  Synthetic primer
catgccaagtgccttag

SEQ ID NO: 1959 - DNA, 17 bp, Artificial Sequence
  Synthetic primer
aggtgcagagccttact

SEQ ID NO: 1960 - DNA, 17 bp, Artificial Sequence
  Synthetic primer
aacactggtgacactct

SEQ ID NO: 1961 - DNA, 19 bp, Artificial Sequence
  Synthetic primer
ggcttcctaggagggctac

SEQ ID NO: 1962 - DNA, 17 bp, Artificial Sequence
  Synthetic primer
gctcttcctctttgtag

SEQ ID NO: 1963 - DNA, 17 bp, Artificial Sequence
  Synthetic primer
tgggcaagtgtcctaag

SEQ ID NO: 1964 - DNA, 17 bp, Artificial Sequence
  Synthetic primer
taagcccacaatcctcc

SEQ ID NO: 1965 - DNA, 17 bp, Artificial Sequence
  Synthetic primer
accccttgtccctgata

SEQ ID NO: 1966 - DNA, 19 bp, Artificial Sequence
  Synthetic primer
ccaactcttggacatactt

SEQ ID NO: 1967 - DNA, 17 bp, Artificial Sequence
  Synthetic primer
acaggccccaagctgga

SEQ ID NO: 1968 - DNA, 18 bp, Artificial Sequence
  Synthetic primer
cgggaggcagagcagatg

SEQ ID NO: 1969 - DNA, 17 bp, Artificial Sequence
  Synthetic primer
taagccggcagcagaac

SEQ ID NO: 1970 - DNA, 19 bp, Artificial Sequence
  Synthetic primer
ctcagctgtgtgctgggca

SEQ ID NO: 1971 - DNA, 17 bp, Artificial Sequence
  Synthetic primer
cttggggaggcccatca

SEQ ID NO: 1972 - DNA, 17 bp, Artificial Sequence
  Synthetic primer
gctggaggctcgattac

SEQ ID NO: 1973 - DNA, 17 bp, Artificial Sequence
  Synthetic primer
gtgagtccacaccaacc

SEQ ID NO: 1974 - DNA, 17 bp, Artificial Sequence
  Synthetic primer
gaggaagggtatacggt

SEQ ID NO: 1975 - DNA, 21 bp, Artificial Sequence
  Synthetic primer
ctatgctgggttcatccctaa

SEQ ID NO: 1976 - DNA, 19 bp, Artificial Sequence
  Synthetic primer
gaatccccatcacccagag

SEQ ID NO: 1977 - DNA, 20 bp, Artificial Sequence
  Synthetic primer
cagtgagaagagagtatggg

SEQ ID NO: 1978 - DNA, 17 bp, Artificial Sequence
  Synthetic primer
tcctcttccctatgccg

SEQ ID NO: 1979 - DNA, 20 bp, Artificial Sequence
  Synthetic primer
gcctgttgctgattgcttca

SEQ ID NO: 1980 - DNA, 17 bp, Artificial Sequence
  Synthetic primer
gaatacccttcttcctc

SEQ ID NO: 1981 - DNA, 20 bp, Artificial Sequence
  Synthetic primer
gcataaaggtgcaaatcttt

SEQ ID NO: 1982 - DNA, 20 bp, Artificial Sequence
  Synthetic primer
gatgtcaggagttcgagacc

SEQ ID NO: 1983 - DNA, 18 bp, Artificial Sequence
  Synthetic primer
ccagctactcgggaggct

SEQ ID NO: 1984 - DNA, 18 bp, Artificial Sequence
  Synthetic primer
cccaagtagctagaacta

SEQ ID NO: 1985 - DNA, 20 bp, Artificial Sequence
  Synthetic primer
gaagtgaaagttctgtgggg

SEQ ID NO: 1986 - DNA, 22 bp, Artificial Sequence
  Synthetic primer
gggaaaaaaaaacacacacaca

SEQ ID NO: 1987 - DNA, 19 bp, Artificial Sequence
  Synthetic primer
gccaaacaggaggcagtca

SEQ ID NO: 1988 - DNA, 20 bp, Artificial Sequence
  Synthetic primer
ggctgtctctcttctcagtg

SEQ ID NO: 1989 - DNA, 17 bp, Artificial Sequence
  Synthetic primer
agttcaccctgttttct

SEQ ID NO: 1990 - DNA, 21 bp, Artificial Sequence
  Synthetic primer
ccgaacttcaaggagacagaa

SEQ ID NO: 1991 - DNA, 17 bp, Artificial Sequence
  Synthetic primer
tcatctgtgctgcctcc

SEQ ID NO: 1992 - DNA, 19 bp, Artificial Sequence
  Synthetic primer
cggaggcagcacagatgaa

SEQ ID NO: 1993 - DNA, 21 bp, Artificial Sequence
  Synthetic primer
gttgaaggctgagatggcaaa

SEQ ID NO: 1994 - DNA, 22 bp, Artificial Sequence
  Synthetic primer
ctgagaacctctttttatttta

SEQ ID NO: 1995 - DNA, 17 bp, Artificial Sequence
  Synthetic primer
ccatttacaactgccca

SEQ ID NO: 1996 - DNA, 19 bp, Artificial Sequence
  Synthetic primer
tttgccagaaaacttagag

SEQ ID NO: 1997 - DNA, 18 bp, Artificial Sequence
  Synthetic primer
gacaaaaatgtcagacct

SEQ ID NO: 1998 - DNA, 17 bp, Artificial Sequence
  Synthetic primer
ggccaagtggccaagca

SEQ ID NO: 1999 - DNA, 21 bp, Artificial Sequence
  Synthetic primer
gtaggcgatattgaaatccca

SEQ ID NO: 2000 - DNA, 20 bp, Artificial Sequence
  Synthetic primer
cactgtaggtttataacctg

SEQ ID NO: 2001 - DNA, 20 bp, Artificial Sequence
  Synthetic primer
taccagttcctaactgccac

SEQ ID NO: 2002 - DNA, 19 bp, Artificial Sequence
  Synthetic primer
ttgccccaggccaaggata

SEQ ID NO: 2003 - DNA, 20 bp, Artificial Sequence
  Synthetic primer
cttggcctggggcaaacaat

SEQ ID NO: 2004 - DNA, 20 bp, Artificial Sequence
  Synthetic primer
gggctctctgatggttgcat

SEQ ID NO: 2005 - DNA, 19 bp, Artificial Sequence
  Synthetic primer
ggacactatcatagctcat

SEQ ID NO: 2006 - DNA, 23 bp, Artificial Sequence
  Synthetic primer
aagttgtttttaaatgtgaaagt

SEQ ID NO: 2007 - DNA, 17 bp, Artificial Sequence
  Synthetic primer
ggcccatgcctgtaatc

SEQ ID NO: 2008 - DNA, 17 bp, Artificial Sequence
  Synthetic primer
gagtagcagggactacg

SEQ ID NO: 2009 - DNA, 20 bp, Artificial Sequence
  Synthetic primer
caagaccctatctcaaaaag

SEQ ID NO: 2010 - DNA, 17 bp, Artificial Sequence
  Synthetic primer
ggcctgaagttttcaga

SEQ ID NO: 2011 - DNA, 19 bp, Artificial Sequence
  Synthetic primer
tcatgcatgttctttgttt

SEQ ID NO: 2012 - DNA, 19 bp, Artificial Sequence
  Synthetic primer
acgtggtgagaccctgtct

SEQ ID NO: 2013 - DNA, 19 bp, Artificial Sequence
  Synthetic primer
caacgtggtgagaccctgt

SEQ ID NO: 2014 - DNA, 17 bp, Artificial Sequence
  Synthetic primer
cctgggcaacgtggtga

SEQ ID NO: 2015 - DNA, 20 bp, Artificial Sequence
  Synthetic primer
agatggagtcttgctctgtc

SEQ ID NO: 2016 - DNA, 19 bp, Artificial Sequence
  Synthetic primer
gaggctgaggcaggaggat

SEQ ID NO: 2017 - DNA, 22 bp, Artificial Sequence
  Synthetic primer
cattaaggtcagcatttaccac

SEQ ID NO: 2018 - DNA, 22 bp, Artificial Sequence
  Synthetic primer
agacaagcaacataacctcttt

SEQ ID NO: 2019 - DNA, 19 bp, Artificial Sequence
  Synthetic primer
agaacaccaggacaggtgc

SEQ ID NO: 2020 - DNA, 21 bp, Artificial Sequence
  Synthetic primer
gaaggtgctcactgtctagta

SEQ ID NO: 2021 - DNA, 18 bp, Artificial Sequence
  Synthetic primer
gtctggctgttgccgccc

SEQ ID NO: 2022 - DNA, 20 bp, Artificial Sequence
  Synthetic primer
gctacaatcgcaaggatctg

SEQ ID NO: 2023 - DNA, 17 bp, Artificial Sequence
  Synthetic primer
aaaccacctgctcagac

SEQ ID NO: 2024 - DNA, 18 bp, Artificial Sequence
  Synthetic primer
ctcctggcctatccgtcc

SEQ ID NO: 2025 - DNA, 19 bp, Artificial Sequence
  Synthetic primer
tggggcgcgtacacataca

SEQ ID NO: 2026 - DNA, 20 bp, Artificial Sequence
  Synthetic primer
aaccctttgctctgaaaggc

SEQ ID NO: 2027 - DNA, 18 bp, Artificial Sequence
  Synthetic primer
tgcctggcaggagcgatc

SEQ ID NO: 2028 - DNA, 20 bp, Artificial Sequence
  Synthetic primer
aagcagagtctacaagtccc

SEQ ID NO: 2029 - DNA, 22 bp, Artificial Sequence
  Synthetic primer
gtctgactcttagaagacaaaa

SEQ ID NO: 2030 - DNA, 17 bp, Artificial Sequence
  Synthetic primer
ccacacctctctgtttc

SEQ ID NO: 2031 - DNA, 18 bp, Artificial Sequence
  Synthetic primer
gtgagccgtcgtgccaag

SEQ ID NO: 2032 - DNA, 19 bp, Artificial Sequence
  Synthetic primer
gggattacaggtgtgagcc

SEQ ID NO: 2033 - DNA, 19 bp, Artificial Sequence
  Synthetic primer
gcaacatggcgaaaccctg

SEQ ID NO: 2034 - DNA, 21 bp, Artificial Sequence
  Synthetic primer
caacatagtgagagcctgtct

SEQ ID NO: 2035 - DNA, 25 bp, Artificial Sequence
  Synthetic primer
ataggctaaaatgttttacatataa

SEQ ID NO: 2036 - DNA, 24 bp, Artificial Sequence
  Synthetic primer
taaccagtaaaacttcatgattta

SEQ ID NO: 2037 - DNA, 19 bp, Artificial Sequence
  Synthetic primer
ctcctgagtagctgggact

SEQ ID NO: 2038 - DNA, 19 bp, Artificial Sequence
  Synthetic primer
gcctcctgagtagctggga

SEQ ID NO: 2039 - DNA, 18 bp, Artificial Sequence
  Synthetic primer
caggaggctagggtggga

SEQ ID NO: 2040 - DNA, 21 bp, Artificial Sequence
  Synthetic primer
taggtcagtagaatagtgtcg

SEQ ID NO: 2041 - DNA, 18 bp, Artificial Sequence
  Synthetic primer
ctaactcctccccccccc

SEQ ID NO: 2042 - DNA, 19 bp, Artificial Sequence
  Synthetic primer
aatctaactcctccccccc

SEQ ID NO: 2043 - DNA, 21 bp, Artificial Sequence
  Synthetic primer
ggaacattcacttggggactt

SEQ ID NO: 2044 - DNA, 19 bp, Artificial Sequence
  Synthetic primer
tggtgggtggttgggatga

SEQ ID NO: 2045 - DNA, 19 bp, Artificial Sequence
  Synthetic primer
gttgtggtgagccgagatc

SEQ ID NO: 2046 - DNA, 20 bp, Artificial Sequence
  Synthetic primer
aggctcaggaattaggtgac

SEQ ID NO: 2047 - DNA, 18 bp, Artificial Sequence
  Synthetic primer
ccgggaggcagaggttgc

SEQ ID NO: 2048 - DNA, 24 bp, Artificial Sequence
  Synthetic primer
tcctcatgaaaatcaacttttttt

SEQ ID NO: 2049 - DNA, 24 bp, Artificial Sequence
  Synthetic primer
tcctcatgaaaatcaacttttttt

SEQ ID NO: 2050 - DNA, 23 bp, Artificial Sequence
  Synthetic primer
gatccgagagctttacaaacact

SEQ ID NO: 2051 - DNA, 20 bp, Artificial Sequence
  Synthetic primer
cctcattgtccctctccaga

SEQ ID NO: 2052 - DNA, 18 bp, Artificial Sequence
  Synthetic primer
ggctggagtgcagtggca

SEQ ID NO: 2053 - DNA, 19 bp, Artificial Sequence
  Synthetic primer
tgctgctacaacaggcacg

SEQ ID NO: 2054 - DNA, 19 bp, Artificial Sequence
  Synthetic primer
tgttgcctaggctggtctc

SEQ ID NO: 2055 - DNA, 22 bp, Artificial Sequence
  Synthetic primer
cagtacctactcttattttctc

SEQ ID NO: 2056 - DNA, 18 bp, Artificial Sequence
  Synthetic primer
ccctctgcttccccctgg

SEQ ID NO: 2057 - DNA, 18 bp, Artificial Sequence
  Synthetic primer
cagatgcttttttttccc

SEQ ID NO: 2058 - DNA, 19 bp, Artificial Sequence
  Synthetic primer
catagatctagtgggcatc

SEQ ID NO: 2059 - DNA, 22 bp, Artificial Sequence
  Synthetic primer
gaaaatgatgatccccaaatct

SEQ ID NO: 2060 - DNA, 19 bp, Artificial Sequence
  Synthetic primer
ctcagctactcaggaggct

SEQ ID NO: 2061 - DNA, 19 bp, Artificial Sequence
  Synthetic primer
ggcaggcggatcacaaggt

SEQ ID NO: 2062 - DNA, 18 bp, Artificial Sequence
  Synthetic primer
catgagccatcgcgcctg

SEQ ID NO: 2063 - DNA, 20 bp, Artificial Sequence
  Synthetic primer
aagaaacagagcgagacacc

SEQ ID NO: 2064 - DNA, 18 bp, Artificial Sequence
  Synthetic primer
caggtggatcgcctgagg

SEQ ID NO: 2065 - DNA, 19 bp, Artificial Sequence
  Synthetic primer
tgttggccaggctgttctc

SEQ ID NO: 2066 - DNA, 21 bp, Artificial Sequence
  Synthetic primer
ccaggattaggagtgtgacaa

SEQ ID NO: 2067 - DNA, 17 bp, Artificial Sequence
  Synthetic primer
ccttgtcacactcctaa

SEQ ID NO: 2068 - DNA, 20 bp, Artificial Sequence
  Synthetic primer
tctgcaacttgcccttttca

SEQ ID NO: 2069 - DNA, 23 bp, Artificial Sequence
  Synthetic primer
atggaaacatgtcaaataaattt

SEQ ID NO: 2070 - DNA, 20 bp, Artificial Sequence
  Synthetic primer
gtagctgggactaaaggtgc

SEQ ID NO: 2071 - DNA, 20 bp, Artificial Sequence
  Synthetic primer
taaggaattgccagccatga

SEQ ID NO: 2072 - DNA, 23 bp, Artificial Sequence
  Synthetic primer
cacattcttacataggatttttt

SEQ ID NO: 2073 - DNA, 22 bp, Artificial Sequence
  Synthetic primer
aatacacaagcttttcaaccca

SEQ ID NO: 2074 - DNA, 18 bp, Artificial Sequence
  Synthetic primer
gagccactgtgcccagac

SEQ ID NO: 2075 - DNA, 21 bp, Artificial Sequence
  Synthetic primer
gaccctattacttaaaatgac

SEQ ID NO: 2076 - DNA, 19 bp, Artificial Sequence
  Synthetic primer
tctcctcgcattctctccc

SEQ ID NO: 2077 - DNA, 20 bp, Artificial Sequence
  Synthetic primer
acctgaggtcaggagtttga

SEQ ID NO: 2078 - DNA, 20 bp, Artificial Sequence
  Synthetic primer
cagcctgggcaacatagtga

SEQ ID NO: 2079 - DNA, 19 bp, Artificial Sequence
  Synthetic primer
ggtgtgcaccaccatgcct

SEQ ID NO: 2080 - DNA, 18 bp, Artificial Sequence
  Synthetic primer
tggcttcagcctcccagg

SEQ ID NO: 2081 - DNA, 17 bp, Artificial Sequence
  Synthetic primer
tggcatgcgcctgtagt

SEQ ID NO: 2082 - DNA, 20 bp, Artificial Sequence
  Synthetic primer
atggggaaatactcaagaaa

SEQ ID NO: 2083 - DNA, 24 bp, Artificial Sequence
  Synthetic primer
ataatagttttatcctgccttttt

SEQ ID NO: 2084 - DNA, 21 bp, Artificial Sequence
  Synthetic primer
caccttctctcaacctaacct

SEQ ID NO: 2085 - DNA, 21 bp, Artificial Sequence
  Synthetic primer
actttaagaggactggcaaga

SEQ ID NO: 2086 - DNA, 21 bp, Artificial Sequence
  Synthetic primer
ggagtggaatttcttttttac

SEQ ID NO: 2087 - DNA, 23 bp, Artificial Sequence
  Synthetic primer
gcaattctctttcttactctaaa

SEQ ID NO: 2088 - DNA, 21 bp, Artificial Sequence
  Synthetic primer
gcaattctctttcttactcta

SEQ ID NO: 2089 - DNA, 21 bp, Artificial Sequence
  Synthetic primer
gcctttcttttcttttttttt

SEQ ID NO: 2090 - DNA, 23 bp, Artificial Sequence
  Synthetic primer
ccagggccaaaatttatcattat

SEQ ID NO: 2091 - DNA, 21 bp, Artificial Sequence
  Synthetic primer
ctcaggacaaagctgacctat

SEQ ID NO: 2092 - DNA, 19 bp, Artificial Sequence
  Synthetic primer
gggcctcctgaggaagaag

SEQ ID NO: 2093 - DNA, 19 bp, Artificial Sequence
  Synthetic primer
ggcacactccaccacacct

SEQ ID NO: 2094 - DNA, 21 bp, Artificial Sequence
  Synthetic primer
aaagattcagaaaatgaagga

SEQ ID NO: 2095 - DNA, 20 bp, Artificial Sequence
  Synthetic primer
aactgggcatttggaggtca

SEQ ID NO: 2096 - DNA, 17 bp, Artificial Sequence
  Synthetic primer
ggggccatttggcagaa

SEQ ID NO: 2097 - DNA, 20 bp, Artificial Sequence
  Synthetic primer
attacaggcgtgagccaccg

SEQ ID NO: 2098 - DNA, 17 bp, Artificial Sequence
  Synthetic primer
cccgccaccgcgcccag

SEQ ID NO: 2099 - DNA, 17 bp, Artificial Sequence
  Synthetic primer
cacccgccaccgcgccc

SEQ ID NO: 2100 - DNA, 20 bp, Artificial Sequence
  Synthetic primer
ctacctcctactgtgggcaa

SEQ ID NO: 2101 - DNA, 18 bp, Artificial Sequence
  Synthetic primer
ctgatccaccgcagccag

SEQ ID NO: 2102 - DNA, 19 bp, Artificial Sequence
  Synthetic primer
ttacaggcatgcgccacca

SEQ ID NO: 2103 - DNA, 19 bp, Artificial Sequence
  Synthetic primer
ccagactggagtacagtgg

SEQ ID NO: 2104 - DNA, 20 bp, Artificial Sequence
  Synthetic primer
gttgcagtgagccaagactg

SEQ ID NO: 2105 - DNA, 18 bp, Artificial Sequence
  Synthetic primer
ctgtcgcccaggctggag

SEQ ID NO: 2106 - DNA, 20 bp, Artificial Sequence
  Synthetic primer
ttaatagctggcacagtcta

SEQ ID NO: 2107 - DNA, 19 bp, Artificial Sequence
  Synthetic primer
gttggttcttcccagttgc

SEQ ID NO: 2108 - DNA, 19 bp, Artificial Sequence
  Synthetic primer
tccagtggtgcaatctcgg

SEQ ID NO: 2109 - DNA, 20 bp, Artificial Sequence
  Synthetic primer
gagagaaatcctctgtatct

SEQ ID NO: 2110 - DNA, 22 bp, Artificial Sequence
  Synthetic primer
atgttgaacttcctcattctgt

SEQ ID NO: 2111 - DNA, 20 bp, Artificial Sequence
  Synthetic primer
tctcagatctcatgcgtaac

SEQ ID NO: 2112 - DNA, 18 bp, Artificial Sequence
  Synthetic primer
gtgtgaacctgggaggcg

SEQ ID NO: 2113 - DNA, 24 bp, Artificial Sequence
  Synthetic primer
tcccaaagtcaatccatctctaag

SEQ ID NO: 2114 - DNA, 17 bp, Artificial Sequence
  Synthetic primer
gtccagactcaaaatga

SEQ ID NO: 2115 - DNA, 19 bp, Artificial Sequence
  Synthetic primer
tggctcacgcctgtaatcc

SEQ ID NO: 2116 - DNA, 19 bp, Artificial Sequence
  Synthetic primer
tggggacggggaaggtgct

SEQ ID NO: 2117 - DNA, 20 bp, Artificial Sequence
  Synthetic primer
tgggggaaatctcagatccc

SEQ ID NO: 2118 - DNA, 17 bp, Artificial Sequence
  Synthetic primer
ccctcatcacctttcac

SEQ ID NO: 2119 - DNA, 20 bp, Artificial Sequence
  Synthetic primer
gggataggcgttgagatata

SEQ ID NO: 2120 - DNA, 19 bp, Artificial Sequence
  Synthetic primer
cccggagattgaagctgca

SEQ ID NO: 2121 - DNA, 20 bp, Artificial Sequence
  Synthetic primer
tctgatctcccaggttatgc

SEQ ID NO: 2122 - DNA, 23 bp, Artificial Sequence
  Synthetic primer
tcattttttttagtactcacgac

SEQ ID NO: 2123 - DNA, 23 bp, Artificial Sequence
  Synthetic primer
ctagttccttttccccattaaaa

SEQ ID NO: 2124 - DNA, 17 bp, Artificial Sequence
  Synthetic primer
gtggggtagagagtgaa

SEQ ID NO: 2125 - DNA, 17 bp, Artificial Sequence
  Synthetic primer
ctctctaccccaccccc

SEQ ID NO: 2126 - DNA, 17 bp, Artificial Sequence
  Synthetic primer
gccctctcctttgtagt

SEQ ID NO: 2127 - DNA, 21 bp, Artificial Sequence
  Synthetic primer
ggtgcttaacaaacacattaa

SEQ ID NO: 2128 - DNA, 20 bp, Artificial Sequence
  Synthetic primer
atggtagcactcgtaacact

SEQ ID NO: 2129 - DNA, 17 bp, Artificial Sequence
  Synthetic primer
ggctcctgtccaccccc

SEQ ID NO: 2130 - DNA, 24 bp, Artificial Sequence
  Synthetic primer
agtgaataacattaaagtacgata

SEQ ID NO: 2131 - DNA, 21 bp, Artificial Sequence
  Synthetic primer
gcctaagcaacatggcaaaac

SEQ ID NO: 2132 - DNA, 22 bp, Artificial Sequence
  Synthetic primer
gatgtgtaggtgagagacatgc

SEQ ID NO: 2133 - DNA, 20 bp, Artificial Sequence
  Synthetic primer
aggcacagagcagcaagcac

SEQ ID NO: 2134 - DNA, 22 bp, Artificial Sequence
  Synthetic primer
ctcctgttgcattttctgaatg

SEQ ID NO: 2135 - DNA, 19 bp, Artificial Sequence
  Synthetic primer
ctgcactgggttgctctgt

SEQ ID NO: 2136 - DNA, 20 bp, Artificial Sequence
  Synthetic primer
atcccacttcagcacctaca

SEQ ID NO: 2137 - DNA, 22 bp, Artificial Sequence
  Synthetic primer
tgctgaagtgggatgagcttct

SEQ ID NO: 2138 - DNA, 18 bp, Artificial Sequence
  Synthetic primer
aaggggaggtcgactggg

SEQ ID NO: 2139 - DNA, 20 bp, Artificial Sequence
  Synthetic primer
gtcttgatacccaccctctg

SEQ ID NO: 2140 - DNA, 17 bp, Artificial Sequence
  Synthetic primer
atcggggcaaaatcaaa

SEQ ID NO: 2141 - DNA, 17 bp, Artificial Sequence
  Synthetic primer
ggctggagctgctctta

SEQ ID NO: 2142 - DNA, 18 bp, Artificial Sequence
  Synthetic primer
tccctccccatacctcct

SEQ ID NO: 2143 - DNA, 19 bp, Artificial Sequence
  Synthetic primer
aatcctgcttccctcccca

SEQ ID NO: 2144 - DNA, 17 bp, Artificial Sequence
  Synthetic primer
ggaggcagaagccagat

SEQ ID NO: 2145 - DNA, 21 bp, Artificial Sequence
  Synthetic primer
aagatgggagcaagctggcaa

SEQ ID NO: 2146 - DNA, 22 bp, Artificial Sequence
  Synthetic primer
gatatcctgtctctctttccat

SEQ ID NO: 2147 - DNA, 19 bp, Artificial Sequence
  Synthetic primer
gcctatagaattcacttca

SEQ ID NO: 2148 - DNA, 21 bp, Artificial Sequence
  Synthetic primer
taaagccaaaaaagcaaagat

SEQ ID NO: 2149 - DNA, 17 bp, Artificial Sequence
  Synthetic primer
cgtgagccgctgtgccc

SEQ ID NO: 2150 - DNA, 20 bp, Artificial Sequence
  Synthetic primer
aaaattagctgggcgtggtg

SEQ ID NO: 2151 - DNA, 19 bp, Artificial Sequence
  Synthetic primer
aattagctgggcgtggtgg

SEQ ID NO: 2152 - DNA, 18 bp, Artificial Sequence
  Synthetic primer
gtaccagttgtttgttgg

SEQ ID NO: 2153 - DNA, 17 bp, Artificial Sequence
  Synthetic primer
gtgcgcagtgacagtta

SEQ ID NO: 2154 - DNA, 21 bp, Artificial Sequence
  Synthetic primer
gcttgctgtgatagaatcgta

SEQ ID NO: 2155 - DNA, 19 bp, Artificial Sequence
  Synthetic primer
gtatggctgtggagggttg

SEQ ID NO: 2156 - DNA, 20 bp, Artificial Sequence
  Synthetic primer
cctaagcatagacagcatgg

SEQ ID NO: 2157 - DNA, 19 bp, Artificial Sequence
  Synthetic primer
gacggagtctcgctctgtc

SEQ ID NO: 2158 - DNA, 21 bp, Artificial Sequence
  Synthetic primer
tgaaaccccgtctctactaaa

SEQ ID NO: 2159 - DNA, 20 bp, Artificial Sequence
  Synthetic primer
gggcccctttgtacttttca

SEQ ID NO: 2160 - DNA, 18 bp, Artificial Sequence
  Synthetic primer
ggccctgcctcagactca

SEQ ID NO: 2161 - DNA, 19 bp, Artificial Sequence
  Synthetic primer
accaaacatgtaaaaaccc

SEQ ID NO: 2162 - DNA, 17 bp, Artificial Sequence
  Synthetic primer
gatccccttcccaccct

SEQ ID NO: 2163 - DNA, 17 bp, Artificial Sequence
  Synthetic primer
ggatctccctaggtccc

SEQ ID NO: 2164 - DNA, 18 bp, Artificial Sequence
  Synthetic primer
tccttttggcccccaccc

SEQ ID NO: 2165 - DNA, 20 bp, Artificial Sequence
  Synthetic primer
ctcacttgctcaggcttcta

SEQ ID NO: 2166 - DNA, 21 bp, Artificial Sequence
  Synthetic primer
atacagtaccctaacctgcta

SEQ ID NO: 2167 - DNA, 17 bp, Artificial Sequence
  Synthetic primer
accagctcctcttttgc

SEQ ID NO: 2168 - DNA, 18 bp, Artificial Sequence
  Synthetic primer
ctgggcagggcagactgt

SEQ ID NO: 2169 - DNA, 19 bp, Artificial Sequence
  Synthetic primer
ctgtgacactcttgagggc

SEQ ID NO: 2170 - DNA, 18 bp, Artificial Sequence
  Synthetic primer
atgtgtctgctgcagact

SEQ ID NO: 2171 - DNA, 17 bp, Artificial Sequence
  Synthetic primer
tgctatgtctcagctcc

SEQ ID NO: 2172 - DNA, 17 bp, Artificial Sequence
  Synthetic primer
tgttcgcttccaagatg

SEQ ID NO: 2173 - DNA, 20 bp, Artificial Sequence
  Synthetic primer
agtacagtggcacagtccta

SEQ ID NO: 2174 - DNA, 17 bp, Artificial Sequence
  Synthetic primer
ggatgtccccctgggcc

SEQ ID NO: 2175 - DNA, 24 bp, Artificial Sequence
  Synthetic primer
tagttttatctttggcaaacattt

SEQ ID NO: 2176 - DNA, 22 bp, Artificial Sequence
  Synthetic primer
ccctagaccaggtggccagtca

SEQ ID NO: 2177 - DNA, 22 bp, Artificial Sequence
  Synthetic primer
cacactaatatgacggatgtct

SEQ ID NO: 2178 - DNA, 20 bp, Artificial Sequence
  Synthetic primer
gctagcacagcacagagacc

SEQ ID NO: 2179 - DNA, 20 bp, Artificial Sequence
  Synthetic primer
gctgtcttccaccctatccc

SEQ ID NO: 2180 - DNA, 20 bp, Artificial Sequence
  Synthetic primer
atcgattattttctcctgct

SEQ ID NO: 2181 - DNA, 20 bp, Artificial Sequence
  Synthetic primer
ctcgagactaagccccaccc

SEQ ID NO: 2182 - DNA, 17 bp, Artificial Sequence
  Synthetic primer
gcctacctatctgcccc

SEQ ID NO: 2183 - DNA, 20 bp, Artificial Sequence
  Synthetic primer
agacatgcagtagacttagt

SEQ ID NO: 2184 - DNA, 17 bp, Artificial Sequence
  Synthetic primer
cgacagagccagactcc

SEQ ID NO: 2185 - DNA, 20 bp, Artificial Sequence
  Synthetic primer
ttactgggtcagctccctcc

SEQ ID NO: 2186 - DNA, 17 bp, Artificial Sequence
  Synthetic primer
tggttagaccctctgtt

SEQ ID NO: 2187 - DNA, 20 bp, Artificial Sequence
  Synthetic primer
tgtcctcctaccccatggca

SEQ ID NO: 2188 - DNA, 17 bp, Artificial Sequence
  Synthetic primer
agcaagctggtgtcaga

SEQ ID NO: 2189 - DNA, 24 bp, Artificial Sequence
  Synthetic primer
agcccagaaattttatgcaattga

SEQ ID NO: 2190 - DNA, 22 bp, Artificial Sequence
  Synthetic primer
catgatttctcaggttttctga

SEQ ID NO: 2191 - DNA, 22 bp, Artificial Sequence
  Synthetic primer
aagacaagcagaaatggtggag

SEQ ID NO: 2192 - DNA, 17 bp, Artificial Sequence
  Synthetic primer
tctaaacctcagttgcc

SEQ ID NO: 2193 - DNA, 23 bp, Artificial Sequence
  Synthetic primer
gaaatcatgagtcaattgcataa

SEQ ID NO: 2194 - DNA, 30 bp, Artificial Sequence; identical to SEQ ID NO: 1525
  Synthetic primer

SEQ ID NO: 2195 - DNA, 28 bp, Artificial Sequence
  Synthetic primer
acgttggatgttgaccctctggtcctgc

SEQ ID NO: 2196 - DNA, 30 bp, Artificial Sequence
  Synthetic primer
acgttggatgcccgtctctggggaaaaaaa

SEQ ID NO: 2197 - DNA, 30 bp, Artificial Sequence
  Synthetic primer
acgttggatgcccagcctatatcctgcttt

SEQ ID NO: 2198 - DNA, 30 bp, Artificial Sequence
  Synthetic primer
acgttggatgattttggcaacttagaagtc

SEQ ID NO: 2199 - DNA, 30 bp, Artificial Sequence
  Synthetic primer
acgttggatggcctccattcactcttgaac

SEQ ID NO: 2200 - DNA, 20 bp, Artificial Sequence
  Synthetic primer
tgtaaaccacctgctcagac

SEQ ID NO: 2201 - DNA, 20 bp, Artificial Sequence
  Synthetic primer
atggggaaatactcaagaaa

SEQ ID NO: 2202 - DNA, 20 bp, Artificial Sequence
  Synthetic primer
cctggaggcagaagccagat

SEQ ID NO: 2203 - DNA, 30 bp, Artificial Sequence
  Synthetic primer
acgttggatgatcttctgacctcgtgatcc

SEQ ID NO: 2204 - DNA, 30 bp, Artificial Sequence
  Synthetic primer
acgttggatgcaacagagtgagaccctgtc

SEQ ID NO: 2205 - DNA, 30 bp, Artificial Sequence
  Synthetic primer
acgttggatggggttcatgccgttctcctg

SEQ ID NO: 2206 - DNA, 30 bp, Artificial Sequence
  Synthetic primer
acgttggatgaaattagccgggtgtagtgg

SEQ ID NO: 2207 - DNA, 30 bp, Artificial Sequence
  Synthetic primer
acgttggatgcacctagcatcatctagacc

SEQ ID NO: 2208 - DNA, 30 bp, Artificial Sequence
  Synthetic primer
acgttggatgttagggtaccaagtggatgg

SEQ ID NO: 2209 - DNA, 30 bp, Artificial Sequence
  Synthetic primer
acgttggatggcgttggcatttataaggcc

SEQ ID NO: 2210 - DNA, 30 bp, Artificial Sequence
  Synthetic primer
acgttggatgtctccagggtctacttcaag

SEQ ID NO: 2211 - DNA, 30 bp, Artificial Sequence
  Synthetic primer
acgttggatgaacttggagcgccgactccg

SEQ ID NO: 2212 - DNA, 29 bp, Artificial Sequence
  Synthetic primer
acgttggatgatgcacggagggcggagct

SEQ ID NO: 2213 - DNA, 30 bp, Artificial Sequence
  Synthetic primer
acgttggatgaccagagaagtgagtgacag

SEQ ID NO: 2214 - DNA, 28 bp, Artificial Sequence
  Synthetic primer
acgttggatgttttgttgtttattgtac

SEQ ID NO: 2215 - DNA, 30 bp, Artificial Sequence
  Synthetic primer
acgttggatgatctcggctcactgcaacct

SEQ ID NO: 2216 - DNA, 30 bp, Artificial Sequence
  Synthetic primer
acgttggatggcgcctacaataccagctac

SEQ ID NO: 2217 - DNA, 30 bp, Artificial Sequence
  Synthetic primer
acgttggatgtagtagagacagggtttcac

SEQ ID NO: 2218 - DNA, 30 bp, Artificial Sequence
  Synthetic primer
acgttggatgtgacggagaatgccaaacac

SEQ ID NO: 2219 - DNA, 30 bp, Artificial Sequence; identical to SEQ ID NO: 2217
  Synthetic primer

SEQ ID NO: 2220 - DNA, 30 bp, Artificial Sequence; identical to SEQ ID NO: 2218
  Synthetic primer

SEQ ID NO: 2221 - DNA, 30 bp, Artificial Sequence
  Synthetic primer
acgttggatgtctcccttaagtgagccaag

SEQ ID NO: 2222 - DNA, 30 bp, Artificial Sequence
  Synthetic primer
acgttggatgttccacacctgtgttcatgg

SEQ ID NO: 2223 - DNA, 30 bp, Artificial Sequence
  Synthetic primer
acgttggatgtgtaacacaggacgaggatc

SEQ ID NO: 2224 - DNA, 30 bp, Artificial Sequence
  Synthetic primer
acgttggatgatggcaccattgcactccag

SEQ ID NO: 2225 - DNA, 30 bp, Artificial Sequence
  Synthetic primer
acgttggatgagcctggacaacaagagcaa

SEQ ID NO: 2226 - DNA, 30 bp, Artificial Sequence; identical to SEQ ID NO: 2223
  Synthetic primer

SEQ ID NO: 2227 - DNA, 30 bp, Artificial Sequence; identical to SEQ ID NO: 2225
  Synthetic primer

SEQ ID NO: 2228 - DNA, 30 bp, Artificial Sequence; identical to SEQ ID NO: 2223
  Synthetic primer

SEQ ID NO: 2229 - DNA, 31 bp, Artificial Sequence
  Synthetic primer
acgttggatgggaattagatggttataatgg

SEQ ID NO: 2230 - DNA, 30 bp, Artificial Sequence
  Synthetic primer
acgttggatgcaccactttaactaaagtac

SEQ ID NO: 2231 - DNA, 30 bp, Artificial Sequence
  Synthetic primer
acgttggatgagaagagcaattcccgaaag

SEQ ID NO: 2232 - DNA, 30 bp, Artificial Sequence
  Synthetic primer
acgttggatgtccaggtttcttggtagtcc

SEQ ID NO: 2233 - DNA, 30 bp, Artificial Sequence
  Synthetic primer
acgttggatggggactaccaagaaacctgg

SEQ ID NO: 2234 - DNA, 36 bp, Artificial Sequence
  Synthetic primer
acgttggatgtccacgagctccgagagtttcctatg

SEQ ID NO: 2235 - DNA, 30 bp, Artificial Sequence
  Synthetic primer
acgttggatgagggaggcaaacacttcttc

SEQ ID NO: 2236 - DNA, 30 bp, Artificial Sequence
  Synthetic primer
acgttggatgacaatgcaagggagaaaccg

SEQ ID NO: 2237 - DNA, 30 bp, Artificial Sequence
  Synthetic primer
acgttggatgaggcagtggacggtaattgg

SEQ ID NO: 2238 - DNA, 36 bp, Artificial Sequence
  Synthetic primer
acgttggatgtccacgctgcaggtgcctgatgtgtt

SEQ ID NO: 2239 - DNA, 30 bp, Artificial Sequence
  Synthetic primer
acgttggatgttctaaaccaaccaggcgtg

SEQ ID NO: 2240 - DNA, 30 bp, Artificial Sequence
  Synthetic primer
acgttggatgttacctaaggtgatctgccc

SEQ ID NO: 2241 - DNA, 30 bp, Artificial Sequence
  Synthetic primer
acgttggatgtaagctcctgtaatcccagc

SEQ ID NO: 2242 - DNA, 30 bp, Artificial Sequence
  Synthetic primer
acgttggatgaggctgatctcgaactcttg

SEQ ID NO: 2243 - DNA, 30 bp, Artificial Sequence
  Synthetic primer
acgttggatgatattagccagctgtggtgg

SEQ ID NO: 2244 - DNA, 30 bp, Artificial Sequence
  Synthetic primer
acgttggatgactgcatccttgaactcctg

SEQ ID NO: 2245 - DNA, 30 bp, Artificial Sequence
  Synthetic primer
acgttggatgacctaggagtgaccagtttc

SEQ ID NO: 2246 - DNA, 30 bp, Artificial Sequence
  Synthetic primer
acgttggatggggagttatttttttcctag

SEQ ID NO: 2247 - DNA, 30 bp, Artificial Sequence
  Synthetic primer
acgttggatgtgggttcaagcgattctcac

SEQ ID NO: 2248 - DNA, 30 bp, Artificial Sequence
  Synthetic primer
acgttggatgtaaaatagctgggcgtggtg

SEQ ID NO: 2249 - DNA, 30 bp, Artificial Sequence
  Synthetic primer
acgttggatggaaaccagaaccaggacatc

SEQ ID NO: 2250 - DNA, 30 bp, Artificial Sequence
  Synthetic primer
acgttggatgacagagcaagactctgtctc

SEQ ID NO: 2251 - DNA, 30 bp, Artificial Sequence
  Synthetic primer
acgttggatgatgggaagcagccatgcttc

SEQ ID NO: 2252 - DNA, 36 bp, Artificial Sequence
  Synthetic primer
acgttggatgtccacgtggtgcttgggccatcatag

SEQ ID NO: 2253 - DNA, 31 bp, Artificial Sequence
  Synthetic primer
acgttggatggcagtccacaaaatgtaatac

SEQ ID NO: 2254 - DNA, 30 bp, Artificial Sequence
  Synthetic primer
acgttggatgaagtaacttggagttcctgc

SEQ ID NO: 2255 - DNA, 30 bp, Artificial Sequence
  Synthetic primer
acgttggatgtaatcccagcactttggcag

SEQ ID NO: 2256 - DNA, 30 bp, Artificial Sequence
  Synthetic primer
acgttggatgtctcattatgttgtccaggc

SEQ ID NO: 2257 - DNA, 30 bp, Artificial Sequence
  Synthetic primer
acgttggatgtttttgagatggagtctcgc

SEQ ID NO: 2258 - DNA, 30 bp, Artificial Sequence
  Synthetic primer
acgttggatgaatggcatgaacctggaagg

SEQ ID NO: 2259 - DNA, 30 bp, Artificial Sequence
  Synthetic primer
acgttggatgaatgacaggccctcttactg

SEQ ID NO: 2260 - DNA, 30 bp, Artificial Sequence
  Synthetic primer
acgttggatgagagtgagactctgtctcca

SEQ ID NO: 2261 - DNA, 30 bp, Artificial Sequence; identical to SEQ ID NO: 2259
  Synthetic primer

SEQ ID NO: 2262 - DNA, 30 bp, Artificial Sequence; identical to SEQ ID NO: 2260
  Synthetic primer

SEQ ID NO: 2263 - DNA, 30 bp, Artificial Sequence
  Synthetic primer
acgttggatgtatatctaattgggtcttcc

SEQ ID NO: 2264 - DNA, 30 bp, Artificial Sequence; identical to SEQ ID NO: 2260
  Synthetic primer

SEQ ID NO: 2265 - DNA, 30 bp, Artificial Sequence
  Synthetic primer
acgttggatgtaccagcgtgaaccaccatg

SEQ ID NO: 2266 - DNA, 30 bp, Artificial Sequence
  Synthetic primer
acgttggatgcatccccttaggatactggg

SEQ ID NO: 2267 - DNA, 30 bp, Artificial Sequence
  Synthetic primer
acgttggatggcctcacaaatagccaaacc

SEQ ID NO: 2268 - DNA, 30 bp, Artificial Sequence
  Synthetic primer
acgttggatgttgcatagccaccttagacc

SEQ ID NO: 2269 - DNA, 30 bp, Artificial Sequence
  Synthetic primer
acgttggatgtcatcctttttgcgagtccc

SEQ ID NO: 2270 - DNA, 30 bp, Artificial Sequence
  Synthetic primer
acgttggatgtcaatctcccaaggttctgc

SEQ ID NO: 2271 - DNA, 31 bp, Artificial Sequence
  Synthetic primer
acgttggatggtgattcacagagaacaagag

SEQ ID NO: 2272 - DNA, 30 bp, Artificial Sequence
  Synthetic primer
acgttggatggctttttgtagccctgaagg

SEQ ID NO: 2273 - DNA, 30 bp, Artificial Sequence
  Synthetic primer
acgttggatgtcagcagcaaagtcctcttc

SEQ ID NO: 2274 - DNA, 30 bp, Artificial Sequence
  Synthetic primer
acgttggatgaggctgtaatgctatgttgg

SEQ ID NO: 2275 - DNA, 30 bp, Artificial Sequence
  Synthetic primer
acgttggatgggaagaacacaactgttggc

SEQ ID NO: 2276 - DNA, 30 bp, Artificial Sequence
  Synthetic primer
acgttggatgcctgccttaaacacactcag

SEQ ID NO: 2277 - DNA, 30 bp, Artificial Sequence
  Synthetic primer
acgttggatgacatcagggatgtgacttgg

SEQ ID NO: 2278 - DNA, 36 bp, Artificial Sequence
  Synthetic primer
acgttggatgtccacgctgctctgcagccattttag

SEQ ID NO: 2279 - DNA, 30 bp, Artificial Sequence
  Synthetic primer
acgttggatgccaccacgcccagctaattt

SEQ ID NO: 2280 - DNA, 30 bp, Artificial Sequence
  Synthetic primer
acgttggatgaaagcgggcagatggcttga

SEQ ID NO: 2281 - DNA, 30 bp, Artificial Sequence
  Synthetic primer
acgttggatgcgtgcccagcctaaaaattc

SEQ ID NO: 2282 - DNA, 30 bp, Artificial Sequence
  Synthetic primer
acgttggatgttctgctgggcatcagttac

SEQ ID NO: 2283 - DNA, 30 bp, Artificial Sequence
  Synthetic primer
acgttggatgaattctgtgtctggtgaggg

SEQ ID NO: 2284 - DNA, 30 bp, Artificial Sequence
  Synthetic primer
acgttggatggctccttgttctccaccatg

SEQ ID NO: 2285 - DNA, 30 bp, Artificial Sequence
  Synthetic primer
acgttggatggcctctggaactgtgagaag

SEQ ID NO: 2286 - DNA, 30 bp, Artificial Sequence
  Synthetic primer
acgttggatggtgtctcagtcatttcaggc

SEQ ID NO: 2287 - DNA, 30 bp, Artificial Sequence
  Synthetic primer
acgttggatgaatcgcttagtgtctcagtc

SEQ ID NO: 2288 - DNA, 30 bp, Artificial Sequence
  Synthetic primer
acgttggatgatgtttgttgcctaagccag

SEQ ID NO: 2289 - DNA, 30 bp, Artificial Sequence
  Synthetic primer
acgttggatgattccagcctgggtgacaga

SEQ ID NO: 2290 - DNA, 30 bp, Artificial Sequence
  Synthetic primer
acgttggatgtgactgagacactaagcgat

SEQ ID NO: 2291 - DNA, 30 bp, Artificial Sequence
  Synthetic primer
acgttggatggcaggagaatcacatgaacc

SEQ ID NO: 2292 - DNA, 30 bp, Artificial Sequence
  Synthetic primer
acgttggatggcagtagcttgatcactctc

SEQ ID NO: 2293 - DNA, 30 bp, Artificial Sequence
  Synthetic primer
acgttggatgcgcctggcctaatattttat

SEQ ID NO: 2294 - DNA, 30 bp, Artificial Sequence
  Synthetic primer
acgttggatggtgagagattacttgagtcc

SEQ ID NO: 2295 - DNA, 30 bp, Artificial Sequence
  Synthetic primer
acgttggatgagcccgggtgaaagagcaag

SEQ ID NO: 2296 - DNA, 29 bp, Artificial Sequence
  Synthetic primer
acgttggatgattcatctgccttgacctc

SEQ ID NO: 2297 - DNA, 30 bp, Artificial Sequence
  Synthetic primer
acgttggatggctaacacggtgaaactccg

SEQ ID NO: 2298 - DNA, 30 bp, Artificial Sequence
  Synthetic primer
acgttggatgtcccgagtagttgggactac

SEQ ID NO: 2299 - DNA, 30 bp, Artificial Sequence
  Synthetic primer
acgttggatggagtagttgggactacaggc

SEQ ID NO: 2300 - DNA, 30 bp, Artificial Sequence
  Synthetic primer
acgttggatgtaacacggtgaaactccgtc

SEQ ID NO: 2301 - DNA, 30 bp, Artificial Sequence
  Synthetic primer
acgttggatgagcctgaccatcatggtgaa

SEQ ID NO: 2302 - DNA, 30 bp, Artificial Sequence
  Synthetic primer
acgttggatgaattctcctgcctcttcctc

SEQ ID NO: 2303 - DNA, 30 bp, Artificial Sequence
  Synthetic primer
acgttggatggcctaggtgacagaagactc

SEQ ID NO: 2304 - DNA, 30 bp, Artificial Sequence
  Synthetic primer
acgttggatgagccacagcacccagacttt

SEQ ID NO: 2305 - DNA, 30 bp, Artificial Sequence
  Synthetic primer
acgttggatgtggtggtgggcacctgtggt

SEQ ID NO: 2306 - DNA, 30 bp, Artificial Sequence
  Synthetic primer
acgttggatgaagctccatctcccgggttc

SEQ ID NO: 2307 - DNA, 30 bp, Artificial Sequence
  Synthetic primer
acgttggatgagtgattcttctgcttcagc

SEQ ID NO: 2308 - DNA, 30 bp, Artificial Sequence
  Synthetic primer
acgttggatggacagagtgagactctgtct

SEQ ID NO: 2309 - DNA, 30 bp, Artificial Sequence
  Synthetic primer
acgttggatgcttgcagtgagctgagatcg

SEQ ID NO: 2310 - DNA, 30 bp, Artificial Sequence
  Synthetic primer
acgttggatggagctaccgagtctatgttc

SEQ ID NO: 2311 - DNA, 30 bp, Artificial Sequence
  Synthetic primer
acgttggatgatttctaggactaccctggg

SEQ ID NO: 2312 - DNA, 30 bp, Artificial Sequence
  Synthetic primer
acgttggatgagagtgagaccctatctcca

SEQ ID NO: 2313 - DNA, 30 bp, Artificial Sequence
  Synthetic primer
acgttggatgagtgtgagcacacaggttag

SEQ ID NO: 2314 - DNA, 30 bp, Artificial Sequence
  Synthetic primer
acgttggatgccccattctctccatatctc

SEQ ID NO: 2315 - DNA, 30 bp, Artificial Sequence
  Synthetic primer
acgttggatgtaattcgcatgatcctgtgg

SEQ ID NO: 2316 - DNA, 30 bp, Artificial Sequence
  Synthetic primer
acgttggatgtgagaccatcccaaactttc

SEQ ID NO: 2317 - DNA, 30 bp, Artificial Sequence
  Synthetic primer
acgttggatgtcaggagatccttccacttc

SEQ ID NO: 2318 - DNA, 30 bp, Artificial Sequence
  Synthetic primer
acgttggatgtagggagaccccatctttac

SEQ ID NO: 2319 - DNA, 31 bp, Artificial Sequence
  Synthetic primer
acgttggatggcaattaaagaactcagcagg

SEQ ID NO: 2320 - DNA, 30 bp, Artificial Sequence
  Synthetic primer
acgttggatgatcttttgacctcgtgatcc

SEQ ID NO: 2321 - DNA, 30 bp, Artificial Sequence
  Synthetic primer
acgttggatggtcctacgtcagttccgctc

SEQ ID NO: 2322 - DNA, 29 bp, Artificial Sequence
  Synthetic primer
acgttggatggcatgcgcgtggggagaag

SEQ ID NO: 2323 - DNA, 30 bp, Artificial Sequence
  Synthetic primer
acgttggatgtgggaaccacctttcatctc

SEQ ID NO: 2324 - DNA, 36 bp, Artificial Sequence
  Synthetic primer
acgttggatgtccacgaccattggtgctaatggctg

SEQ ID NO: 2325 - DNA, 30 bp, Artificial Sequence
  Synthetic primer
acgttggatgaggggaaatattaaacccgg

SEQ ID NO: 2326 - DNA, 30 bp, Artificial Sequence
  Synthetic primer
acgttggatgctcaaaggagctcctaattc

SEQ ID NO: 2327 - DNA, 30 bp, Artificial Sequence; identical to SEQ ID NO: 2325
  Synthetic primer

SEQ ID NO: 2328 - DNA, 30 bp, Artificial Sequence
  Synthetic primer
acgttggatgcaaaggagctcctaattctc

SEQ ID NO: 2329 - DNA, 30 bp, Artificial Sequence
  Synthetic primer
acgttggatgaattctcctgcctcaccctc

SEQ ID NO: 2330 - DNA, 30 bp, Artificial Sequence
  Synthetic primer
acgttggatgtggccaacctggtaaaaccc

SEQ ID NO: 2331 - DNA, 30 bp, Artificial Sequence
  Synthetic primer
acgttggatgggtcttgaactcctgacctc

SEQ ID NO: 2332 - DNA, 30 bp, Artificial Sequence
  Synthetic primer
acgttggatgcgcagtggcttacacctata

SEQ ID NO: 2333 - DNA, 30 bp, Artificial Sequence
  Synthetic primer
acgttggatgaggttcatgccattctcctg

SEQ ID NO: 2334 - DNA, 30 bp, Artificial Sequence; identical to SEQ ID NO: 347
  Synthetic primer

SEQ ID NO: 2335 - DNA, 30 bp, Artificial Sequence; identical to SEQ ID NO: 143
  Synthetic primer

SEQ ID NO: 2336 - DNA, 30 bp, Artificial Sequence
  Synthetic primer
acgttggatggaagaggcctcgatattagc

SEQ ID NO: 2337 - DNA, 30 bp, Artificial Sequence
  Synthetic primer
acgttggatgctgtagtcccagctactcag

SEQ ID NO: 2338 - DNA, 30 bp, Artificial Sequence
  Synthetic primer
acgttggatgtctcagctcactgcaacctc

SEQ ID NO: 2339 - DNA, 30 bp, Artificial Sequence
  Synthetic primer
acgttggatgagctccagcttgtaaaagcc

SEQ ID NO: 2340 - DNA, 30 bp, Artificial Sequence
  Synthetic primer
acgttggatgttgcctgtccaaaggagaag

SEQ ID NO: 2341 - DNA, 30 bp, Artificial Sequence
  Synthetic primer
acgttggatggtaacctgatggaccctatg

SEQ ID NO: 2342 - DNA, 30 bp, Artificial Sequence
  Synthetic primer
acgttggatgacgaggtgaccatctgcaat

SEQ ID NO: 2343 - DNA, 30 bp, Artificial Sequence
  Synthetic primer
acgttggatgccagcccttaggaaataaag

SEQ ID NO: 2344 - DNA, 30 bp, Artificial Sequence
  Synthetic primer
acgttggatgattacgaagcatctgccaac

SEQ ID NO: 2345 - DNA, 30 bp, Artificial Sequence
  Synthetic primer
acgttggatggctgtggaaattgggtcttg

SEQ ID NO: 2346 - DNA, 36 bp, Artificial Sequence
  Synthetic primer
acgttggatgtccacgcacatggccacattaactgg

SEQ ID NO: 2347 - DNA, 30 bp, Artificial Sequence; identical to SEQ ID NO: 348
  Synthetic primer

SEQ ID NO: 2348 - DNA, 30 bp, Artificial Sequence
  Synthetic primer
acgttggatgcacggtgaaaccgtctctac

SEQ ID NO: 2349 - DNA, 30 bp, Artificial Sequence
  Synthetic primer
acgttggatgaactttaccaccttcccatc

SEQ ID NO: 2350 - DNA, 30 bp, Artificial Sequence
  Synthetic primer
acgttggatggaatagggcatgaaagccag

SEQ ID NO: 2351 - DNA, 30 bp, Artificial Sequence
  Synthetic primer
acgttggatgaagtagcctggccgacagta

SEQ ID NO: 2352 - DNA, 30 bp, Artificial Sequence
  Synthetic primer
acgttggatgccaacatggcagcttctatc

SEQ ID NO: 2353 - DNA, 30 bp, Artificial Sequence
  Synthetic primer
acgttggatgaagtccccaagactggacag

SEQ ID NO: 2354 - DNA, 29 bp, Artificial Sequence
  Synthetic primer
acgttggatgtcgggagggtcccggagag

SEQ ID NO: 2355 - DNA, 30 bp, Artificial Sequence
  Synthetic primer
acgttggatgaaagcgtaagaactccaccc

SEQ ID NO: 2356 - DNA, 30 bp, Artificial Sequence
  Synthetic primer
acgttggatgagggctcgtttgcagtcagt

SEQ ID NO: 2357 - DNA, 30 bp, Artificial Sequence
  Synthetic primer
acgttggatgattctttgtgcccaggacag

SEQ ID NO: 2358 - DNA, 30 bp, Artificial Sequence
  Synthetic primer
acgttggatgaagagcaaaaccaggcacag

SEQ ID NO: 2359 - DNA, 30 bp, Artificial Sequence
  Synthetic primer
acgttggatgtgtcctgtgcctggttttgc

SEQ ID NO: 2360 - DNA, 30 bp, Artificial Sequence
  Synthetic primer
acgttggatgtaccacacatacaccacacg

SEQ ID NO: 2361 - DNA, 30 bp, Artificial Sequence
  Synthetic primer
acgttggatgtgtctggccgtgggtgaaag

SEQ ID NO: 2362 - DNA, 30 bp, Artificial Sequence
  Synthetic primer
acgttggatgaacaccatgtctgtgcccct

SEQ ID NO: 2363 - DNA, 39 bp, Artificial Sequence
  Synthetic primer
acgttggatgacgttggatgaacttctgcccacccctcc

SEQ ID NO: 2364 - DNA, 30 bp, Artificial Sequence
  Synthetic primer
acgttggatggagtatcctgaggccagcag

SEQ ID NO: 2365 - DNA, 30 bp, Artificial Sequence
  Synthetic primer
acgttggatggtgggcagaagttggaggac

SEQ ID NO: 2366 - DNA, 30 bp, Artificial Sequence
  Synthetic primer
acgttggatgggaaaaggatgggaaatggg

SEQ ID NO: 2367 - DNA, 30 bp, Artificial Sequence
  Synthetic primer
acgttggatgagaagttggaggacctaggg

SEQ ID NO: 2368 - DNA, 30 bp, Artificial Sequence
  Synthetic primer
acgttggatgttaccctgtgtctccaagtc

SEQ ID NO: 2369 - DNA, 30 bp, Artificial Sequence
  Synthetic primer
acgttggatgatgtacttgacgtgagggag

SEQ ID NO: 2370 - DNA, 30 bp, Artificial Sequence
  Synthetic primer
acgttggatgttctcttcctaccacatcgg

SEQ ID NO: 2371 - DNA, 30 bp, Artificial Sequence
  Synthetic primer
acgttggatgaggcttttcacaggtgaggg

SEQ ID NO: 2372 - DNA, 29 bp, Artificial Sequence
  Synthetic primer
acgttggatgtggagggaggagagagagg

SEQ ID NO: 2373 - DNA, 30 bp, Artificial Sequence
  Synthetic primer
acgttggatggtggcaccatcttggatctg

SEQ ID NO: 2374 - DNA, 30 bp, Artificial Sequence
  Synthetic primer
acgttggatggtgggaaaaggacaggtcag

SEQ ID NO: 2375 - DNA, 30 bp, Artificial Sequence
  Synthetic primer
acgttggatgagaggcctgtgggaaaagga

SEQ ID NO: 2376 - DNA, 30 bp, Artificial Sequence; identical to SEQ ID NO: 2373
  Synthetic primer

SEQ ID NO: 2377 - DNA, 30 bp, Artificial Sequence
  Synthetic primer
acgttggatgaggtggctaaggccaggaag

SEQ ID NO: 2378 - DNA, 30 bp, Artificial Sequence
  Synthetic primer
acgttggatgccttcctgacctgtcctttt

SEQ ID NO: 2379 - DNA, 30 bp, Artificial Sequence
  Synthetic primer
acgttggatgcacccaaaaaccacatggag

SEQ ID NO: 2380 - DNA, 36 bp, Artificial Sequence
  Synthetic primer
acgttggatgtccacgactttgtccccactctagag

SEQ ID NO: 2381 - DNA, 30 bp, Artificial Sequence
  Synthetic primer
acgttggatgtaattttatcggaatccagg

SEQ ID NO: 2382 - DNA, 36 bp, Artificial Sequence
  Synthetic primer
acgttggatgtccacgctgtctccatgtggtttttg

SEQ ID NO: 2383 - DNA, 31 bp, Artificial Sequence
  Synthetic primer
acgttggatgaggacccccaagagtgagtga

SEQ ID NO: 2384 - DNA, 30 bp, Artificial Sequence
  Synthetic primer
acgttggatgggaaagctctttcagagcaa

SEQ ID NO: 2385 - DNA, 30 bp, Artificial Sequence
  Synthetic primer
acgttggatgataaatgagtgcctgggagg

SEQ ID NO: 2386 - DNA, 30 bp, Artificial Sequence
  Synthetic primer
acgttggatgtccaagagttcatcaggacc

SEQ ID NO: 2387 - DNA, 28 bp, Artificial Sequence
  Synthetic primer
acgttggatgtccactgaccaggaggcc

SEQ ID NO: 2388 - DNA, 28 bp, Artificial Sequence
  Synthetic primer
acgttggatgtggaccctgtggaagata

SEQ ID NO: 2389 - DNA, 28 bp, Artificial Sequence
  Synthetic primer
acgttggatgccaaggctccactgacca

SEQ ID NO: 2390 - DNA, 29 bp, Artificial Sequence
  Synthetic primer
acgttggatgtgtggaagataagagttag

SEQ ID NO: 2391 - DNA, 30 bp, Artificial Sequence
  Synthetic primer
acgttggatgagcctctggcaggaactcag

SEQ ID NO: 2392 - DNA, 36 bp, Artificial Sequence
  Synthetic primer
acgttggatgtccacgtcatgcctggtgggctaagc

SEQ ID NO: 2393 - DNA, 30 bp, Artificial Sequence
  Synthetic primer
acgttggatgagcacacacctcgccgtgtt

SEQ ID NO: 2394 - DNA, 30 bp, Artificial Sequence
  Synthetic primer
acgttggatgttgcgtgccaaagcctgaag

SEQ ID NO: 2395 - DNA, 30 bp, Artificial Sequence
  Synthetic primer
acgttggatgacatcctgtccagccctaag

SEQ ID NO: 2396 - DNA, 30 bp, Artificial Sequence
  Synthetic primer
acgttggatgtgatgtggcagcctgttacg

SEQ ID NO: 2397 - DNA, 30 bp, Artificial Sequence
  Synthetic primer
acgttggatgtgtccagccctaaggctgct

SEQ ID NO: 2398 - DNA, 30 bp, Artificial Sequence
  Synthetic primer
acgttggatggtgatgtggcagcctgttac

SEQ ID NO: 2399 - DNA, 30 bp, Artificial Sequence; identical to SEQ ID NO: 2398
  Synthetic primer

SEQ ID NO: 2400 - DNA, 30 bp, Artificial Sequence; identical to SEQ ID NO: 2397
  Synthetic primer

SEQ ID NO: 2401 - DNA, 30 bp, Artificial Sequence
  Synthetic primer
acgttggatggctaagctccaactacctcc

SEQ ID NO: 2402 - DNA, 30 bp, Artificial Sequence
  Synthetic primer
acgttggatgtaacaggctgccacatcacc

SEQ ID NO: 2403 - DNA, 30 bp, Artificial Sequence; identical to SEQ ID NO: 2401
  Synthetic primer

SEQ ID NO: 2404 - DNA, 30 bp, Artificial Sequence; identical to SEQ ID NO: 2402
  Synthetic primer

SEQ ID NO: 2405 - DNA, 30 bp, Artificial Sequence
  Synthetic primer
acgttggatggggatctgcaagacaggagg

SEQ ID NO: 2406 - DNA, 29 bp, Artificial Sequence
  Synthetic primer
acgttggatgacttctgcttcttaaagac

SEQ ID NO: 2407 - DNA, 30 bp, Artificial Sequence
  Synthetic primer
acgttggatgagaaggcctctgggaagaag

SEQ ID NO: 2408 - DNA, 36 bp, Artificial Sequence
  Synthetic primer
acgttggatgtccacgaaagctgctctgttgctgag

SEQ ID NO: 2409 - DNA, 30 bp, Artificial Sequence
  Synthetic primer
acgttggatgagtgctgcagatggtccagg

SEQ ID NO: 2410 - DNA, 29 bp, Artificial Sequence
  Synthetic primer
acgttggatgaggtgggtgaggtgggtgg

SEQ ID NO: 2411 - DNA, 39 bp, Artificial Sequence
  Synthetic primer
acgttggatgacgttggatgaggtgggtgaggtgggtgg

SEQ ID NO: 2412 - DNA, 30 bp, Artificial Sequence
  Synthetic primer
acgttggatgattcagtgctgcagatggtc

SEQ ID NO: 2413 - DNA, 30 bp, Artificial Sequence
  Synthetic primer
acgttggatgggcctaccttcttcccagag

SEQ ID NO: 2414 - DNA, 30 bp, Artificial Sequence
  Synthetic primer
acgttggatggctattcagtgctgcagatg

SEQ ID NO: 2415 - DNA, 30 bp, Artificial Sequence
  Synthetic primer
acgttggatgacgggcacaggctattcagt

SEQ ID NO: 2416 - DNA, 30 bp, Artificial Sequence
  Synthetic primer
acgttggatgttcttcccagaggccttctc

SEQ ID NO: 2417 - DNA, 30 bp, Artificial Sequence
  Synthetic primer
acgttggatggctccataaaccctgttctc

SEQ ID NO: 2418 - DNA, 30 bp, Artificial Sequence
  Synthetic primer
acgttggatgccatctgcagcactgaatag

SEQ ID NO: 2419 - DNA, 30 bp, Artificial Sequence
  Synthetic primer
acgttggatgtatgacacagaggatggcac

SEQ ID NO: 2420 - DNA, 30 bp, Artificial Sequence
  Synthetic primer
acgttggatgtgttccccctgactctcctt

SEQ ID NO: 2421 - DNA, 30 bp, Artificial Sequence
  Synthetic primer
acgttggatgcctgaatgtctttggcaatg

SEQ ID NO: 2422 - DNA, 30 bp, Artificial Sequence
  Synthetic primer
acgttggatgttcctggctcccactcctag

SEQ ID NO: 2423 - DNA, 30 bp, Artificial Sequence
  Synthetic primer
acgttggatgtggtcctaggctcacctgtg

SEQ ID NO: 2424 - DNA, 30 bp, Artificial Sequence
  Synthetic primer
acgttggatgggaggccctgaatgtctttg

SEQ ID NO: 2425 - DNA, 31 bp, Artificial Sequence
  Synthetic primer
acgttggatgtctccacctccaggtggcgat

SEQ ID NO: 2426 - DNA, 30 bp, Artificial Sequence
  Synthetic primer
acgttggatgctcacctgtgccatcctctg

SEQ ID NO: 2427 - DNA, 30 bp, Artificial Sequence
  Synthetic primer
acgttggatgccatcctctgtgtcatagtc

SEQ ID NO: 2428 - DNA, 30 bp, Artificial Sequence
  Synthetic primer
acgttggatgaactgacctgatctccacct

SEQ ID NO: 2429 - DNA, 30 bp, Artificial Sequence
  Synthetic primer
acgttggatgatctgggacgaactgacctg

SEQ ID NO: 2430 - DNA, 30 bp, Artificial Sequence
  Synthetic primer
acgttggatgttgccaaagacattcagggc

SEQ ID NO: 2431 - DNA, 30 bp, Artificial Sequence
  Synthetic primer
acgttggatgaagaacctggtgttcagcag

SEQ ID NO: 2432 - DNA, 30 bp, Artificial Sequence
  Synthetic primer
acgttggatgtaagggttggtacaaccacc

SEQ ID NO: 2433 - DNA, 30 bp, Artificial Sequence
  Synthetic primer
acgttggatgatgtaggccacatcatcacg

SEQ ID NO: 2434 - DNA, 30 bp, Artificial Sequence
  Synthetic primer
acgttggatgaaaaccctgggttccacctc

SEQ ID NO: 2435 - DNA, 30 bp, Artificial Sequence
  Synthetic primer
acgttggatgagtttacacctagcgaaggc

SEQ ID NO: 2436 - DNA, 30 bp, Artificial Sequence
  Synthetic primer
acgttggatgaaaatggcagcacgattggg

SEQ ID NO: 2437 - DNA, 30 bp, Artificial Sequence
  Synthetic primer
acgttggatgcagtttacacctagcgaagg

SEQ ID NO: 2438 - DNA, 30 bp, Artificial Sequence; identical to SEQ ID NO: 2436
  Synthetic primer

SEQ ID NO: 2439 - DNA, 29 bp, Artificial Sequence
  Synthetic primer
acgttggatgtcagcctctgcccatgcca

SEQ ID NO: 2440 - DNA, 30 bp, Artificial Sequence
  Synthetic primer
acgttggatgagtagcctaagttgggcggg

SEQ ID NO: 2441 - DNA, 30 bp, Artificial Sequence
  Synthetic primer
acgttggatgcgggccctttaagtgctgac

SEQ ID NO: 2442 - DNA, 30 bp, Artificial Sequence
  Synthetic primer
acgttggatgaacccgagtgacatgtttcc

SEQ ID NO: 2443 - DNA, 30 bp, Artificial Sequence
  Synthetic primer
acgttggatgttgcaaactggacttccagc

SEQ ID NO: 2444 - DNA, 30 bp, Artificial Sequence
  Synthetic primer
acgttggatgggtgtgtgccaaaccatgaa

SEQ ID NO: 2445 - DNA, 30 bp, Artificial Sequence
  Synthetic primer
acgttggatgttcatcacgcaggatgtcac

SEQ ID NO: 2446 - DNA, 30 bp, Artificial Sequence
  Synthetic primer
acgttggatgcgacggcaggttagaaaatg

SEQ ID NO: 2447 - DNA, 30 bp, Artificial Sequence
  Synthetic primer
acgttggatgtgtggaaagtggagagctac

SEQ ID NO: 2448 - DNA, 30 bp, Artificial Sequence
  Synthetic primer
acgttggatgaaatcacattcagcgtggag

SEQ ID NO: 2449 - DNA, 30 bp, Artificial Sequence
  Synthetic primer
acgttggatgagcgtggagattttccagag

SEQ ID NO: 2450 - DNA, 43 bp, Artificial Sequence
  Synthetic primer
agcggataacaatttcacacaggcagaggccatttgtggaaag

SEQ ID NO: 2451 - DNA, 30 bp, Artificial Sequence
  Synthetic primer
acgttggatgtcatggaggttcttcccaag

SEQ ID NO: 2452 - DNA, 30 bp, Artificial Sequence
  Synthetic primer
acgttggatgttccagagatgctggagttg

SEQ ID NO: 2453 - DNA, 29 bp, Artificial Sequence
  Synthetic primer
acgttggatgagaagtcagagagcaaggg

SEQ ID NO: 2454 - DNA, 30 bp, Artificial Sequence
  Synthetic primer
acgttggatgtggatggaatccgcgagctg

SEQ ID NO: 2455 - DNA, 30 bp, Artificial Sequence
  Synthetic primer
acgttggatgtcatggtatgccctcaacac

SEQ ID NO: 2456 - DNA, 30 bp, Artificial Sequence
  Synthetic primer
acgttggatggctgtcaaggaaaaagcctg

SEQ ID NO: 2457 - DNA, 30 bp, Artificial Sequence
  Synthetic primer
acgttggatgagacagacaggagctcacag

SEQ ID NO: 2458 - DNA, 30 bp, Artificial Sequence
  Synthetic primer
acgttggatgagcatggacagacaactgtg

SEQ ID NO: 2459 - DNA, 30 bp, Artificial Sequence
  Synthetic primer
acgttggatgggcccacagaggtaaaaaac

SEQ ID NO: 2460 - DNA, 30 bp, Artificial Sequence
  Synthetic primer
acgttggatgtttctgtctggccctttcag

SEQ ID NO: 2461 - DNA, 30 bp, Artificial Sequence
  Synthetic primer
acgttggatgacacgcatgggcataagaag

SEQ ID NO: 2462 - DNA, 30 bp, Artificial Sequence
  Synthetic primer
acgttggatgttccatgttcctggtgtctc

SEQ ID NO: 2463 - DNA, 30 bp, Artificial Sequence
  Synthetic primer
acgttggatgtcagaaaaggtctccctgag

SEQ ID NO: 2464 - DNA, 30 bp, Artificial Sequence
  Synthetic primer
acgttggatgtctgccagcagtatctttcc

SEQ ID NO: 2465 - DNA, 30 bp, Artificial Sequence
  Synthetic primer
acgttggatgtccctcatgctgcctgagat

SEQ ID NO: 2466 - DNA, 30 bp, Artificial Sequence
  Synthetic primer
acgttggatgtcctgaagcaggtgggaatg

SEQ ID NO: 2467 - DNA, 30 bp, Artificial Sequence
  Synthetic primer
acgttggatgtgtctcgagcttcacagatc

SEQ ID NO: 2468 - DNA, 36 bp, Artificial Sequence
  Synthetic primer
acgttggatgtccacgaatccaggtgagagacatgg

SEQ ID NO: 2469 - DNA, 30 bp, Artificial Sequence
  Synthetic primer
acgttggatgaggagcctctcaaacggaac

SEQ ID NO: 2470 - DNA, 30 bp, Artificial Sequence
  Synthetic primer
acgttggatgtttcagactgagctgggaag

SEQ ID NO: 2471 - DNA, 30 bp, Artificial Sequence
  Synthetic primer
acgttggatgaggtgagtctgaggcaaaac

SEQ ID NO: 2472 - DNA, 36 bp, Artificial Sequence
  Synthetic primer
acgttggatgtccacgctgccatgaaacagagaagc

SEQ ID NO: 2473 - DNA, 30 bp, Artificial Sequence
  Synthetic primer
acgttggatgtaactcccttgactgtctcc

SEQ ID NO: 2474 - DNA, 30 bp, Artificial Sequence
  Synthetic primer
acgttggatgaatggtggacacagtcatgg

SEQ ID NO: 2475 - DNA, 30 bp, Artificial Sequence
  Synthetic primer
acgttggatgtaggtgtcatggcagtggac

SEQ ID NO: 2476 - DNA, 36 bp, Artificial Sequence
  Synthetic primer
acgttggatgtccacgcaccccagggatcatgaaag

SEQ ID NO: 2477 - DNA, 30 bp, Artificial Sequence
  Synthetic primer
acgttggatgggattgcttgagtctgagag

SEQ ID NO: 2478 - DNA, 30 bp, Artificial Sequence
  Synthetic primer
acgttggatgtcactctgtcattcggctag

SEQ ID NO: 2479 - DNA, 30 bp, Artificial Sequence
  Synthetic primer
acgttggatgagatgtgcaaatgggcttcc

SEQ ID NO: 2480 - DNA, 30 bp, Artificial Sequence
  Synthetic primer
acgttggatgttgtgatctgcccatctcag

SEQ ID NO: 2481 - DNA, 30 bp, Artificial Sequence
  Synthetic primer
acgttggatggcaacttcacttttctgagc

SEQ ID NO: 2482 - DNA, 30 bp, Artificial Sequence
  Synthetic primer
acgttggatgtagcctcagttgccacaatc

SEQ ID NO: 2483 - DNA, 30 bp, Artificial Sequence
  Synthetic primer
acgttggatgggtacggctacagaaaagag

SEQ ID NO: 2484 - DNA, 30 bp, Artificial Sequence
  Synthetic primer
acgttggatggtgactaatcaagtgcagac

SEQ ID NO: 2485 - DNA, 30 bp, Artificial Sequence
  Synthetic primer
acgttggatgaatcacttgaacccaggagg

SEQ ID NO: 2486 - DNA, 30 bp, Artificial Sequence
  Synthetic primer
acgttggatgtttgagacagagtctcactc

SEQ ID NO: 2487 - DNA, 30 bp, Artificial Sequence; identical to SEQ ID NO: 1780
  Synthetic primer

SEQ ID NO: 2488 - DNA, 30 bp, Artificial Sequence
  Synthetic primer
acgttggatgtagtggatagaaaccccgtc

SEQ ID NO: 2489 - DNA, 30 bp, Artificial Sequence
  Synthetic primer
acgttggatgggaagtagtcatctttggag

SEQ ID NO: 2490 - DNA, 30 bp, Artificial Sequence
  Synthetic primer
acgttggatgctgaaaactctcctctatgg

SEQ ID NO: 2491 - DNA, 30 bp, Artificial Sequence
  Synthetic primer
acgttggatgacatggtgaaacgctgtctc

SEQ ID NO: 2492 - DNA, 30 bp, Artificial Sequence
  Synthetic primer
acgttggatgtgagtagctgggattacagg

SEQ ID NO: 2493 - DNA, 30 bp, Artificial Sequence
  Synthetic primer
acgttggatgtctcctgacctcatgatctg

SEQ ID NO: 2494 - DNA, 30 bp, Artificial Sequence
  Synthetic primer
acgttggatgaatcccatacgactggtgac

SEQ ID NO: 2495 - DNA, 30 bp, Artificial Sequence
  Synthetic primer
acgttggatgggttcaagtgattctcccac

SEQ ID NO: 2496 - DNA, 30 bp, Artificial Sequence
  Synthetic primer
acgttggatgcaaaaaattagccggtcgtg

SEQ ID NO: 2497 - DNA, 30 bp, Artificial Sequence
  Synthetic primer
acgttggatgaaaaaattagccggtcgtgg

SEQ ID NO: 2498 - DNA, 30 bp, Artificial Sequence
  Synthetic primer
acgttggatgacctcccaggttcaagtgat

SEQ ID NO: 2499 - DNA, 30 bp, Artificial Sequence
  Synthetic primer
acgttggatgcacctcccaggttcaagtga

SEQ ID NO: 2500 - DNA, 30 bp, Artificial Sequence
  Synthetic primer
acgttggatgaaaattagccggtcgtggtg

SEQ ID NO: 2501 - DNA, 30 bp, Artificial Sequence
  Synthetic primer
acgttggatgaggctgaggtgggagaatca

SEQ ID NO: 2502 - DNA, 30 bp, Artificial Sequence
  Synthetic primer
acgttggatggtacagtggcatgatctcgg

SEQ ID NO: 2503 - DNA, 30 bp, Artificial Sequence
  Synthetic primer
acgttggatgtgaggtgggagaatcacttg

SEQ ID NO: 2504 - DNA, 30 bp, Artificial Sequence
  Synthetic primer
acgttggatgtggagtacagtggcatgatc

SEQ ID NO: 2505 - DNA, 30 bp, Artificial Sequence
  Synthetic primer
acgttggatgaatcacttgaacctgggagg

SEQ ID NO: 2506 - DNA, 30 bp, Artificial Sequence
  Synthetic primer
acgttggatgttagacagagtcttgctctg

SEQ ID NO: 2507 - DNA, 30 bp, Artificial Sequence
  Synthetic primer
acgttggatgagacagagtcttgctctgtc

SEQ ID NO: 2508 - DNA, 30 bp, Artificial Sequence; identical to SEQ ID NO: 2505
  Synthetic primer

SEQ ID NO: 2509 - DNA, 30 bp, Artificial Sequence
  Synthetic primer
acgttggatgatcatgccactgtactccag

SEQ ID NO: 2510 - DNA, 30 bp, Artificial Sequence
  Synthetic primer
acgttggatgctgtgtctctgtgtcttcac

SEQ ID NO: 2511 - DNA, 30 bp, Artificial Sequence
  Synthetic primer
acgttggatgtggctaacacgatgaaaccc

SEQ ID NO: 2512 - DNA, 30 bp, Artificial Sequence
  Synthetic primer
acgttggatgccgggttcaagtgattctcc

SEQ ID NO: 2513 - DNA, 30 bp, Artificial Sequence
  Synthetic primer
acgttggatgctatctttgtgaagcaggag

SEQ ID NO: 2514 - DNA, 30 bp, Artificial Sequence
  Synthetic primer
acgttggatgtctaaaaccctctatgcctg

SEQ ID NO: 2515 - DNA, 30 bp, Artificial Sequence
  Synthetic primer
acgttggatggccctagccctcaatgaaag

SEQ ID NO: 2516 - DNA, 30 bp, Artificial Sequence
  Synthetic primer
acgttggatgcttctacttgcttcaaaggc

SEQ ID NO: 2517 - DNA, 30 bp, Artificial Sequence
  Synthetic primer
acgttggatgttctccagtttctctcccac

SEQ ID NO: 2518 - DNA, 30 bp, Artificial Sequence
  Synthetic primer
acgttggatgcaatacagtgagactccatc

SEQ ID NO: 2519 - DNA, 30 bp, Artificial Sequence
  Synthetic primer
acgttggatgttccgggttcaagcgattct

SEQ ID NO: 2520 - DNA, 30 bp, Artificial Sequence
  Synthetic primer
acgttggatgtggtgaaaccccatctctac

SEQ ID NO: 2521 - DNA, 30 bp, Artificial Sequence
  Synthetic primer
acgttggatgagtgagtgcttgttggaaac

SEQ ID NO: 2522 - DNA, 30 bp, Artificial Sequence
  Synthetic primer
acgttggatgatagcagtaagcagaagcag

SEQ ID NO: 2523 - DNA, 30 bp, Artificial Sequence; identical to SEQ ID NO: 2521
  Synthetic primer

SEQ ID NO: 2524 - DNA, 30 bp, Artificial Sequence
  Synthetic primer
acgttggatggcagtaagcagaagcagaac

SEQ ID NO: 2525 - DNA, 30 bp, Artificial Sequence
  Synthetic primer
acgttggatgccgtgcctggccttttttta

SEQ ID NO: 2526 - DNA, 30 bp, Artificial Sequence
  Synthetic primer
acgttggatgaagatcgtgccactgtactc

SEQ ID NO: 2527 - DNA, 30 bp, Artificial Sequence
  Synthetic primer
acgttggatgtagcaacctgttgggtggag

SEQ ID NO: 2528 - DNA, 30 bp, Artificial Sequence
  Synthetic primer
acgttggatgtgagttgcctcctctgacct

SEQ ID NO: 2529 - DNA, 30 bp, Artificial Sequence
  Synthetic primer
acgttggatgtctgacctcctggaatcatc

SEQ ID NO: 2530 - DNA, 30 bp, Artificial Sequence
  Synthetic primer
acgttggatgaaggcagggagcttagcaac

SEQ ID NO: 2531 - DNA, 30 bp, Artificial Sequence
  Synthetic primer
acgttggatgtttgcaaagggtggtcagag

SEQ ID NO: 2532 - DNA, 30 bp, Artificial Sequence
  Synthetic primer
acgttggatggggttcctcatctggctttt

SEQ ID NO: 2533 - DNA, 30 bp, Artificial Sequence
  Synthetic primer
acgttggatgacactgtgtgatccgctaag

SEQ ID NO: 2534 - DNA, 30 bp, Artificial Sequence
  Synthetic primer
acgttggatggtacatgttccagctgcttc

SEQ ID NO: 2535 - DNA, 30 bp, Artificial Sequence
  Synthetic primer
acgttggatgactgttatttatcgagcccc

SEQ ID NO: 2536 - DNA, 30 bp, Artificial Sequence
  Synthetic primer
acgttggatgttcatgagacagggactttg

SEQ ID NO: 2537 - DNA, 30 bp, Artificial Sequence
  Synthetic primer
acgttggatgatttgccaggcacatacaag

SEQ ID NO: 2538 - DNA, 30 bp, Artificial Sequence
  Synthetic primer
acgttggatgagacagaatgagactgtatc

SEQ ID NO: 2539 - DNA, 30 bp, Artificial Sequence
  Synthetic primer
acgttggatgacctggtgaaatcctgtctc

SEQ ID NO: 2540 - DNA, 30 bp, Artificial Sequence
  Synthetic primer
acgttggatgccaggttcaagtgattctcc

SEQ ID NO: 2541 - DNA, 30 bp, Artificial Sequence
  Synthetic primer
acgttggatgagtaatcttcccgaggtgac

SEQ ID NO: 2542 - DNA, 30 bp, Artificial Sequence
  Synthetic primer
acgttggatgttgtgctctagagccacact

SEQ ID NO: 2543 - DNA, 30 bp, Artificial Sequence
  Synthetic primer
acgttggatgatcaaaacggagagaggctg

SEQ ID NO: 2544 - DNA, 31 bp, Artificial Sequence
  Synthetic primer
acgttggatgtgaccgatggctcgtctggtg

SEQ ID NO: 2545 - DNA, 30 bp, Artificial Sequence
  Synthetic primer
acgttggatgtggctaacatggcgaaaccc

SEQ ID NO: 2546 - DNA, 30 bp, Artificial Sequence
  Synthetic primer
acgttggatgcaccacgcccggcttttttt

SEQ ID NO: 2547 - DNA, 30 bp, Artificial Sequence
  Synthetic primer
acgttggatgatgctacaccgtctggaaag

SEQ ID NO: 2548 - DNA, 30 bp, Artificial Sequence
  Synthetic primer
acgttggatgttatctaggtgtactttctg

SEQ ID NO: 2549 - DNA, 30 bp, Artificial Sequence
  Synthetic primer
acgttggatggccctgaggcaaagaaaatg

SEQ ID NO: 2550 - DNA, 30 bp, Artificial Sequence
  Synthetic primer
acgttggatgagtgagactccatctcaaac

SEQ ID NO: 2551 - DNA, 30 bp, Artificial Sequence
  Synthetic primer
acgttggatgaccccactaattggtcacag

SEQ ID NO: 2552 - DNA, 30 bp, Artificial Sequence
  Synthetic primer
acgttggatgcaacacagtgagacttcgtc

SEQ ID NO: 2553 - DNA, 20 bp, Artificial Sequence
  Synthetic primer
ggattacaggcatgagccac

SEQ ID NO: 2554 - DNA, 18 bp, Artificial Sequence
  Synthetic primer
ccgttctcctgcctcagc

SEQ ID NO: 2555 - DNA, 22 bp, Artificial Sequence
  Synthetic primer
gaccttataatcagcattggat

SEQ ID NO: 2556 - DNA, 17 bp, Artificial Sequence
  Synthetic primer
ggccagggtctggcgcg

SEQ ID NO: 2557 - DNA, 17 bp, Artificial Sequence
  Synthetic primer
cggcctcctcgccggaa

SEQ ID NO: 2558 - DNA, 20 bp, Artificial Sequence
  Synthetic primer
aagaacgcgtttaacttaat

SEQ ID NO: 2559 - DNA, 18 bp, Artificial Sequence
  Synthetic primer
gtctcccgggttcaggca

SEQ ID NO: 2560 - DNA, 20 bp, Artificial Sequence
  Synthetic primer
ccaggctggtcttgaactca

SEQ ID NO: 2561 - DNA, 20 bp, Artificial Sequence
  Synthetic primer
caggctggtcttgaactcag

SEQ ID NO: 2562 - DNA, 22 bp, Artificial Sequence
  Synthetic primer
aacagagttacagcaatgtcta

SEQ ID NO: 2563 - DNA, 17 bp, Artificial Sequence
  Synthetic primer
ggagatggagttttgct

SEQ ID NO: 2564 - DNA, 21 bp, Artificial Sequence
  Synthetic primer
ggacaacaagagcaaaactcc

SEQ ID NO: 2565 - DNA, 22 bp, Artificial Sequence
  Synthetic primer
gacaacaagagcaaaactccat

SEQ ID NO: 2566 - DNA, 17 bp, Artificial Sequence
  Synthetic primer
gaatgttctggaaacca

SEQ ID NO: 2567 - DNA, 17 bp, Artificial Sequence
  Synthetic primer
agcgccctcgggatgcc

SEQ ID NO: 2568 - DNA, 18 bp, Artificial Sequence
  Synthetic primer
aagaaacctggaaagcca

SEQ ID NO: 2569 - DNA, 19 bp, Artificial Sequence
  Synthetic primer
ctgtccttctctttcttta

SEQ ID NO: 2570 - DNA, 20 bp, Artificial Sequence
  Synthetic primer
gacggtaattggcctgtatc

SEQ ID NO: 2571 - DNA, 20 bp, Artificial Sequence
  Synthetic primer
ctgtaatcccagcactttgg

SEQ ID NO: 2572 - DNA, 20 bp, Artificial Sequence
  Synthetic primer
cactttaggaggccaaggca

SEQ ID NO: 2573 - DNA, 19 bp, Artificial Sequence
  Synthetic primer
cccagctacttgggaggat

SEQ ID NO: 2574 - DNA, 20 bp, Artificial Sequence
  Synthetic primer
ttggtcttcatcttagtagt

SEQ ID NO: 2575 - DNA, 19 bp, Artificial Sequence
  Synthetic primer
attctcacgcctcagcctc

SEQ ID NO: 2576 - DNA, 22 bp, Artificial Sequence
  Synthetic primer
ttgtgtacaagcacttttccat

SEQ ID NO: 2577 - DNA, 18 bp, Artificial Sequence
  Synthetic primer
ccatgcttccgccagtag

SEQ ID NO: 2578 - DNA, 20 bp, Artificial Sequence
  Synthetic primer
gagttaaaaactagtgctga

SEQ ID NO: 2579 - DNA, 20 bp, Artificial Sequence
  Synthetic primer
tcccttgaatccaggagttc

SEQ ID NO: 2580 - DNA, 18 bp, Artificial Sequence
  Synthetic primer
ccaggctggagtgcagtg

SEQ ID NO: 2581 - DNA, 23 bp, Artificial Sequence
  Synthetic primer
gccctcttactgtttttttatag

SEQ ID NO: 2582 - DNA, 24 bp, Artificial Sequence
  Synthetic primer
ctaattgggtcttccaatttattt

SEQ ID NO: 2583 - DNA, 22 bp, Artificial Sequence
  Synthetic primer
gggtcttccaatttatttattt

SEQ ID NO: 2584 - DNA, 18 bp, Artificial Sequence
  Synthetic primer
gaaccaccatgcctggcc

SEQ ID NO: 2585 - DNA, 17 bp, Artificial Sequence
  Synthetic primer
caaaccagtaaacagca

SEQ ID NO: 2586 - DNA, 24 bp, Artificial Sequence
  Synthetic primer
cccacctttttgtttttttttttt

SEQ ID NO: 2587 - DNA, 19 bp, Artificial Sequence
  Synthetic primer
caagagattaaagtgctgg

SEQ ID NO: 2588 - DNA, 20 bp, Artificial Sequence
  Synthetic primer
aagtcctcttcccaagccaa

SEQ ID NO: 2589 - DNA, 20 bp, Artificial Sequence
  Synthetic primer
ttgggaagaggactttgctg

SEQ ID NO: 2590 - DNA, 18 bp, Artificial Sequence
  Synthetic primer
tgtgacttggtgcgaaga

SEQ ID NO: 2591 - DNA, 18 bp, Artificial Sequence
  Synthetic primer
cgttggccaggctggtct

SEQ ID NO: 2592 - DNA, 20 bp, Artificial Sequence
  Synthetic primer
ctcaagttcaacagtcattt

SEQ ID NO: 2593 - DNA, 20 bp, Artificial Sequence
  Synthetic primer
ggccctcttcttggtttgca

SEQ ID NO: 2594 - DNA, 17 bp, Artificial Sequence
  Synthetic primer
tgcctaagccagtcagt

SEQ ID NO: 2595 - DNA, 21 bp, Artificial Sequence
  Synthetic primer
tagtgtctcagtcatttcagg

SEQ ID NO: 2596 - DNA, 17 bp, Artificial Sequence
  Synthetic primer
tgacagagtgagacttc

SEQ ID NO: 2597 - DNA, 19 bp, Artificial Sequence
  Synthetic primer
cacatgaacccgggaggca

SEQ ID NO: 2598 - DNA, 20 bp, Artificial Sequence
  Synthetic primer
atctcactatgttgcccagg

SEQ ID NO: 2599 - DNA, 20 bp, Artificial Sequence
  Synthetic primer
gtgaaagagcaagaccctgt

SEQ ID NO: 2600 - DNA, 17 bp, Artificial Sequence
  Synthetic primer
agccgagcgtggtggcg

SEQ ID NO: 2601 - DNA, 17 bp, Artificial Sequence
  Synthetic primer
ctcgccaccacgctcgg

SEQ ID NO: 2602 - DNA, 20 bp, Artificial Sequence
  Synthetic primer
ggtgtgagcctgtaattcca

SEQ ID NO: 2603 - DNA, 20 bp, Artificial Sequence
  Synthetic primer
gtgacagaagactccatctc

SEQ ID NO: 2604 - DNA, 18 bp, Artificial Sequence
  Synthetic primer
cgggaggctgaggcagga

SEQ ID NO: 2605 - DNA, 19 bp, Artificial Sequence
  Synthetic primer
cgcacaccaccatacccag

SEQ ID NO: 2606 - DNA, 17 bp, Artificial Sequence
  Synthetic primer
ctgcactccagcctggg

SEQ ID NO: 2607 - DNA, 19 bp, Artificial Sequence
  Synthetic primer
actaccctggggcaggtaa

SEQ ID NO: 2608 - DNA, 19 bp, Artificial Sequence
  Synthetic primer
ctgcatgcgtggacacaag

SEQ ID NO: 2609 - DNA, 20 bp, Artificial Sequence
  Synthetic primer
gcatgatcctgtggattagc

SEQ ID NO: 2610 - DNA, 19 bp, Artificial Sequence
  Synthetic primer
gagccaccatgctgggcta

SEQ ID NO: 2611 - DNA, 18 bp, Artificial Sequence
  Synthetic primer
gaactcagcaggccgggc

SEQ ID NO: 2612 - DNA, 17 bp, Artificial Sequence
  Synthetic primer
tccgctcgaccccaccc

SEQ ID NO: 2613 - DNA, 19 bp, Artificial Sequence
  Synthetic primer
ctttcatctccctaggctc

SEQ ID NO: 2614 - DNA, 17 bp, Artificial Sequence
  Synthetic primer
acccggtaagaagaaaa

SEQ ID NO: 2615 - DNA, 23 bp, Artificial Sequence
  Synthetic primer
tattaaacccggtaagaagaaaa

SEQ ID NO: 2616 - DNA, 21 bp, Artificial Sequence
  Synthetic primer
ccaggcccagctaatttttgt

SEQ ID NO: 2617 - DNA, 20 bp, Artificial Sequence
  Synthetic primer
ctcctgacctcaggtaatcc

SEQ ID NO: 2618 - DNA, 17 bp, Artificial Sequence
  Synthetic primer
cctgccaccacgcccgg

SEQ ID NO: 2619 - DNA, 17 bp, Artificial Sequence
  Synthetic primer
tgagccactgcgcccgg

SEQ ID NO: 2620 - DNA, 20 bp, Artificial Sequence
  Synthetic primer
gcatgagagtcacttgaacc

SEQ ID NO: 2621 - DNA, 17 bp, Artificial Sequence
  Synthetic primer
gtaaaagccaggcaaag

SEQ ID NO: 2622 - DNA, 19 bp, Artificial Sequence
  Synthetic primer
tctgctgggttggcagatg

SEQ ID NO: 2623 - DNA, 19 bp, Artificial Sequence
  Synthetic primer
gggtaacctgatggaccct

SEQ ID NO: 2624 - DNA, 18 bp, Artificial Sequence
  Synthetic primer
ggcatctggcagtcatgg

SEQ ID NO: 2625 - DNA, 17 bp, Artificial Sequence
  Synthetic primer
gctcccgccaccgcacc

SEQ ID NO: 2626 - DNA, 19 bp, Artificial Sequence
  Synthetic primer
acctcttaaggcctcgggt

SEQ ID NO: 2627 - DNA, 17 bp, Artificial Sequence
  Synthetic primer
gccgacagtacggaacc

SEQ ID NO: 2628 - DNA, 17 bp, Artificial Sequence
  Synthetic primer
tcactccccacccccat

SEQ ID NO: 2629 - DNA, 17 bp, Artificial Sequence
  Synthetic primer
ggtgctccacgcccccc

SEQ ID NO: 2630 - DNA, 17 bp, Artificial Sequence
  Synthetic primer
gtgctgtgtggggctga

SEQ ID NO: 2631 - DNA, 17 bp, Artificial Sequence
  Synthetic primer
ctggttttgctcttgac

SEQ ID NO: 2632 - DNA, 17 bp, Artificial Sequence
  Synthetic primer
tgaaaggggacccttac

SEQ ID NO: 2633 - DNA, 17 bp, Artificial Sequence
  Synthetic primer
aggtagcagccaaacag

SEQ ID NO: 2634 - DNA, 17 bp, Artificial Sequence
  Synthetic primer
agttggaggacctaggg

SEQ ID NO: 2635 - DNA, 17 bp, Artificial Sequence
  Synthetic primer
aggggaagccttcctgt

SEQ ID NO: 2636 - DNA, 17 bp, Artificial Sequence
  Synthetic primer
gtgcctgtaggagggac

SEQ ID NO: 2637 - DNA, 17 bp, Artificial Sequence
  Synthetic primer
ggtgagtgagctgtgcc

SEQ ID NO: 2638 - DNA, 17 bp, Artificial Sequence
  Synthetic primer
ggtcgagcccctgtccc

SEQ ID NO: 2639 - DNA, 17 bp, Artificial Sequence
  Synthetic primer
aaaggacaggtcaggaa

SEQ ID NO: 2640 - DNA, 18 bp, Artificial Sequence
  Synthetic primer
ggccaggaaggaaggccc

SEQ ID NO: 2641 - DNA, 18 bp, Artificial Sequence
  Synthetic primer
cacatggagacagaagac

SEQ ID NO: 2642 - DNA, 20 bp, Artificial Sequence
  Synthetic primer
tatcggaatccaggacacaa

SEQ ID NO: 2643 - DNA, 19 bp, Artificial Sequence
  Synthetic primer
ggctctggcacaaaacctc

SEQ ID NO: 2644 - DNA, 20 bp, Artificial Sequence
  Synthetic primer
gaggaggaggttttgtgcca

SEQ ID NO: 2645 - DNA, 18 bp, Artificial Sequence
  Synthetic primer
accaggaggccgaggtct

SEQ ID NO: 2646 - DNA, 18 bp, Artificial Sequence
  Synthetic primer
tccactgaccaggaggcc

SEQ ID NO: 2647 - DNA, 18 bp, Artificial Sequence
  Synthetic primer
tggagctgctggggccaa

SEQ ID NO: 2648 - DNA, 18 bp, Artificial Sequence
  Synthetic primer
cctcgccgtgttgcaggt

SEQ ID NO: 2649 - DNA, 19 bp, Artificial Sequence
  Synthetic primer
ctaaggctgctgtccaccc

SEQ ID NO: 2650 - DNA, 18 bp, Artificial Sequence
  Synthetic primer
ccagctcctcttgggcca

SEQ ID NO: 2651 - DNA, 19 bp, Artificial Sequence
  Synthetic primer
cagcctgttacgccaaccc

SEQ ID NO: 2652 - DNA, 18 bp, Artificial Sequence
  Synthetic primer
cccgtacaaggtggtggc

SEQ ID NO: 2653 - DNA, 20 bp, Artificial Sequence
  Synthetic primer
cagatcccgtacaaggtggt

SEQ ID NO: 2654 - DNA, 20 bp, Artificial Sequence
  Synthetic primer
caggaggtagttggagctta

SEQ ID NO: 2655 - DNA, 18 bp, Artificial Sequence
  Synthetic primer
aagaaggtaggccccccc

SEQ ID NO: 2656 - DNA, 19 bp, Artificial Sequence
  Synthetic primer
ctatggagaaggcctctgg

SEQ ID NO: 2657 - DNA, 17 bp, Artificial Sequence
  Synthetic primer
cctaccttcttcccaga

SEQ ID NO: 2658 - DNA, 17 bp, Artificial Sequence
  Synthetic primer
cagaggccttctccata

SEQ ID NO: 2659 - DNA, 20 bp, Artificial Sequence
  Synthetic primer
acaggctattcagtgctgca

SEQ ID NO: 2660 - DNA, 17 bp, Artificial Sequence
  Synthetic primer
gtgggccagatctacaa

SEQ ID NO: 2661 - DNA, 17 bp, Artificial Sequence
  Synthetic primer
acaggtgagcctaggac

SEQ ID NO: 2662 - DNA, 18 bp, Artificial Sequence
  Synthetic primer
actatgacacagaggatg

SEQ ID NO: 2663 - DNA, 19 bp, Artificial Sequence
  Synthetic primer
cctgtgccatcctctgtgt

SEQ ID NO: 2664 - DNA, 20 bp, Artificial Sequence
  Synthetic primer
ggaggccctgaatgtctttg

SEQ ID NO: 2665 - DNA, 20 bp, Artificial Sequence
  Synthetic primer
ccaaagacattcagggcctc

SEQ ID NO: 2666 - DNA, 17 bp, Artificial Sequence
  Synthetic primer
ctgatctccacctccag

SEQ ID NO: 2667 - DNA, 18 bp, Artificial Sequence
  Synthetic primer
gtgtacgggaacccccag

SEQ ID NO: 2668 - DNA, 17 bp, Artificial Sequence
  Synthetic primer
ccagacacacattcccc

SEQ ID NO: 2669 - DNA, 19 bp, Artificial Sequence
  Synthetic primer
agacagaaccccttcctgc

SEQ ID NO: 2670 - DNA, 17 bp, Artificial Sequence
  Synthetic primer
ctgagcagacagaaccc

SEQ ID NO: 2671 - DNA, 18 bp, Artificial Sequence
  Synthetic primer
ccggtcactcctggctca

SEQ ID NO: 2672 - DNA, 17 bp, Artificial Sequence
  Synthetic primer
gtgctgacggcccactc

SEQ ID NO: 2673 - DNA, 19 bp, Artificial Sequence
  Synthetic primer
ccttagtcccgtgggatcg

SEQ ID NO: 2674 - DNA, 22 bp, Artificial Sequence
  Synthetic primer
ctagctctactacttttcattg

SEQ ID NO: 2675 - DNA, 20 bp, Artificial Sequence
  Synthetic primer
atctgccaactccagcatct

SEQ ID NO: 2676 - DNA, 18 bp, Artificial Sequence
  Synthetic primer
gatgctggagttggcaga

SEQ ID NO: 2677 - DNA, 20 bp, Artificial Sequence
  Synthetic primer
ggccatttgtggaaagtgga

SEQ ID NO: 2678 - DNA, 18 bp, Artificial Sequence
  Synthetic primer
gcagggtggagccgtgta

SEQ ID NO: 2679 - DNA, 20 bp, Artificial Sequence
  Synthetic primer
cagggaaaacatcagcatgg

SEQ ID NO: 2680 - DNA, 18 bp, Artificial Sequence
  Synthetic primer
cacaggcagctggtgccc

SEQ ID NO: 2681 - DNA, 20 bp, Artificial Sequence
  Synthetic primer
gacaattgtgaggcagagag

SEQ ID NO: 2682 - DNA, 21 bp, Artificial Sequence
  Synthetic primer
cagggtgactttgacagttca

SEQ ID NO: 2683 - DNA, 20 bp, Artificial Sequence
  Synthetic primer
ggtggctttcagactggaac

SEQ ID NO: 2684 - DNA, 17 bp, Artificial Sequence
  Synthetic primer
ctgcctgagatggaccc

SEQ ID NO: 2685 - DNA, 18 bp, Artificial Sequence
  Synthetic primer
cttcacagatcagaacac

SEQ ID NO: 2686 - DNA, 17 bp, Artificial Sequence
  Synthetic primer
cagatcatctccctccc

SEQ ID NO: 2687 - DNA, 21 bp, Artificial Sequence
  Synthetic primer
ggcaaaacttcatcctgatca

SEQ ID NO: 2688 - DNA, 17 bp, Artificial Sequence
  Synthetic primer
gtctccccaacacagag

SEQ ID NO: 2689 - DNA, 20 bp, Artificial Sequence
  Synthetic primer
acttcctgcatgacagcaga

SEQ ID NO: 2690 - DNA, 17 bp, Artificial Sequence
  Synthetic primer
agtaagccgagatcaca

SEQ ID NO: 2691 - DNA, 17 bp, Artificial Sequence
  Synthetic primer
cgggcacggtggctcac

SEQ ID NO: 2692 - DNA, 18 bp, Artificial Sequence
  Synthetic primer
gatgaccctttggtcata

SEQ ID NO: 2693 - DNA, 17 bp, Artificial Sequence
  Synthetic primer
cgggaccaaatcatgca

SEQ ID NO: 2694 - DNA, 19 bp, Artificial Sequence
  Synthetic primer
gtgagccaagatcacgcca

SEQ ID NO: 2695 - DNA, 19 bp, Artificial Sequence
  Synthetic primer
gcctcagcctcccaagtag

SEQ ID NO: 2696 - DNA, 19 bp, Artificial Sequence
  Synthetic primer
gagctgcctcagagctctt

SEQ ID NO: 2697 - DNA, 19 bp, Artificial Sequence
  Synthetic primer
aaattagccgggcgtggtg

SEQ ID NO: 2698 - DNA, 18 bp, Artificial Sequence
  Synthetic primer
cggcctcccaaagtgctg

SEQ ID NO: 2699 - DNA, 18 bp, Artificial Sequence
  Synthetic primer
tctcccacctcagcctcc

SEQ ID NO: 2700 - DNA, 18 bp, Artificial Sequence
  Synthetic primer
ctactcgggaggctgagg

SEQ ID NO: 2701 - DNA, 20 bp, Artificial Sequence
  Synthetic primer
ccaggttcaagtgattctcc

SEQ ID NO: 2702 - DNA, 20 bp, Artificial Sequence
  Synthetic primer
gtgggagaatcacttgaacc

SEQ ID NO: 2703 - DNA, 19 bp, Artificial Sequence
  Synthetic primer
ttgaacctgggaggtggag

SEQ ID NO: 2704 - DNA, 19 bp, Artificial Sequence
  Synthetic primer
gtggagcttgcagtgagcc

SEQ ID NO: 2705 - DNA, 18 bp, Artificial Sequence
  Synthetic primer
tgtcgcccaggctggagt

SEQ ID NO: 2706 - DNA, 19 bp, Artificial Sequence
  Synthetic primer
cactgtactccagcctggg

SEQ ID NO: 2707 - DNA, 20 bp, Artificial Sequence
  Synthetic primer
gtggcaggtacctgtaatcc

SEQ ID NO: 2708 - DNA, 21 bp, Artificial Sequence
  Synthetic primer
tttgtgaagcaggagttgtca

SEQ ID NO: 2709 - DNA, 18 bp, Artificial Sequence
  Synthetic primer
caatgaaaggcctttctc

SEQ ID NO: 2710 - DNA, 24 bp, Artificial Sequence
  Synthetic primer
ctctaacttaatctttccacaaaa

SEQ ID NO: 2711 - DNA, 20 bp, Artificial Sequence
  Synthetic primer
cctccagagtagatgggatt

SEQ ID NO: 2712 - DNA, 20 bp, Artificial Sequence
  Synthetic primer
gtgtaagttcccgaagggca

SEQ ID NO: 2713 - DNA, 20 bp, Artificial Sequence
  Synthetic primer
aacaatagtgtgtaagttcc

SEQ ID NO: 2714 - DNA, 17 bp, Artificial Sequence
  Synthetic primer
ggaaatggagtcttcct

SEQ ID NO: 2715 - DNA, 17 bp, Artificial Sequence
  Synthetic primer
gtaggggcgagtgatga

SEQ ID NO: 2716 - DNA, 17 bp, Artificial Sequence
  Synthetic primer
tcatcactcgcccctac

SEQ ID NO: 2717 - DNA, 20 bp, Artificial Sequence
  Synthetic primer
gaaagatgagagagagatgt

SEQ ID NO: 2718 - DNA, 17 bp, Artificial Sequence
  Synthetic primer
cgctaaggatctcaacc

SEQ ID NO: 2719 - DNA, 19 bp, Artificial Sequence
  Synthetic primer
gcccctattatgtcccagg

SEQ ID NO: 2720 - DNA, 25 bp, Artificial Sequence
  Synthetic primer
aagagccatttacatatttatttat

SEQ ID NO: 2721 - DNA, 18 bp, Artificial Sequence
  Synthetic primer
agccaggtgtggtggtgc

SEQ ID NO: 2722 - DNA, 20 bp, Artificial Sequence
  Synthetic primer
aggtgacatggggagttact

SEQ ID NO: 2723 - DNA, 17 bp, Artificial Sequence
  Synthetic primer
ccagcttcggaagtcac

SEQ ID NO: 2724 - DNA, 17 bp, Artificial Sequence
  Synthetic primer
gcgaaacccccgtctct

SEQ ID NO: 2725 - DNA, 23 bp, Artificial Sequence
  Synthetic primer
cctggatagattttttttttttt

SEQ ID NO: 2726 - DNA, 20 bp, Artificial Sequence
  Synthetic primer
ttctctcttttgttttgttg

SEQ ID NO: 2727 - DNA, 24 bp, Artificial Sequence
  Synthetic primer
gggtacaaactttatttaaaacaa

SEQ ID NO: 2728 - DNA, 30 bp, Artificial Sequence
  Synthetic primer
acgttggatgttcactgtgatgtggttgcg

SEQ ID NO: 2729 - DNA, 30 bp, Artificial Sequence
  Synthetic primer
acgttggatgaggaaccacgaaagagtggg

SEQ ID NO: 2730 - DNA, 30 bp, Artificial Sequence
  Synthetic primer
acgttggatgcattgcctcttgcagatgag

SEQ ID NO: 2731 - DNA, 30 bp, Artificial Sequence
  Synthetic primer
acgttggatgatgaaagctgtgtcagactc

SEQ ID NO: 2732 - DNA, 30 bp, Artificial Sequence
  Synthetic primer
acgttggatgccacagagaagctatagctc

SEQ ID NO: 2733 - DNA, 30 bp, Artificial Sequence
  Synthetic primer
acgttggatgaagcaaaatgcctgggcttg

SEQ ID NO: 2734 - DNA, 30 bp, Artificial Sequence
  Synthetic primer
acgttggatgtgcttgtcagatcctagctt

SEQ ID NO: 2735 - DNA, 31 bp, Artificial Sequence
  Synthetic primer
acgttggatgcggtttattcctaatgctgtc

SEQ ID NO: 2736 - DNA, 30 bp, Artificial Sequence
  Synthetic primer
acgttggatgagctgcttgtgggtttctgg

SEQ ID NO: 2737 - DNA, 30 bp, Artificial Sequence
  Synthetic primer
acgttggatgagggaaaagaccactgtggg

SEQ ID NO: 2738 - DNA, 30 bp, Artificial Sequence
  Synthetic primer
acgttggatgaagcaacttgaaggctaggc

SEQ ID NO: 2739 - DNA, 30 bp, Artificial Sequence
  Synthetic primer
acgttggatgcaatgctctaggtcctgtag

SEQ ID NO: 2740 - DNA, 30 bp, Artificial Sequence
  Synthetic primer
acgttggatgattaaaacccttggcagggc

SEQ ID NO: 2741 - DNA, 30 bp, Artificial Sequence
  Synthetic primer
acgttggatgtgcggtttattttccagccc

SEQ ID NO: 2742 - DNA, 30 bp, Artificial Sequence
  Synthetic primer
acgttggatgagcttggatggactctgttc

SEQ ID NO: 2743 - DNA, 30 bp, Artificial Sequence
  Synthetic primer
acgttggatggaatggtcagatgcttaggg

SEQ ID NO: 2744 - DNA, 30 bp, Artificial Sequence; identical to SEQ ID NO: 2743
  Synthetic primer

SEQ ID NO: 2745 - DNA, 30 bp, Artificial Sequence; identical to SEQ ID NO: 2742
  Synthetic primer

SEQ ID NO: 2746 - DNA, 30 bp, Artificial Sequence
  Synthetic primer
acgttggatggctttcccaaatgccatgtg

SEQ ID NO: 2747 - DNA, 30 bp, Artificial Sequence
  Synthetic primer
acgttggatgttatctcagagcagaggagg

SEQ ID NO: 2748 - DNA, 30 bp, Artificial Sequence
  Synthetic primer
acgttggatgtgatagatgctaaggagtgg

SEQ ID NO: 2749 - DNA, 30 bp, Artificial Sequence
  Synthetic primer
acgttggatgatgttgaaaatgtgcacggg

SEQ ID NO: 2750 - DNA, 30 bp, Artificial Sequence
  Synthetic primer
acgttggatgcttagcatctatcacggcag

SEQ ID NO: 2751 - DNA, 30 bp, Artificial Sequence
  Synthetic primer
acgttggatgttgcccttccatgtctactc

SEQ ID NO: 2752 - DNA, 30 bp, Artificial Sequence
  Synthetic primer
acgttggatgttgcatccctttgatagcag

SEQ ID NO: 2753 - DNA, 30 bp, Artificial Sequence
  Synthetic primer
acgttggatgccttcgttcacctatgcttc

SEQ ID NO: 2754 - DNA, 30 bp, Artificial Sequence
  Synthetic primer
acgttggatgggttcattaagtagggcgtg

SEQ ID NO: 2755 - DNA, 30 bp, Artificial Sequence
  Synthetic primer
acgttggatgagaacaggaatgcccatgtg

SEQ ID NO: 2756 - DNA, 30 bp, Artificial Sequence
  Synthetic primer
acgttggatgagtctgtagggttgtgttgc

SEQ ID NO: 2757 - DNA, 30 bp, Artificial Sequence
  Synthetic primer
acgttggatgagtgggccttgtaggaaatg

SEQ ID NO: 2758 - DNA, 30 bp, Artificial Sequence
  Synthetic primer
acgttggatgacagaagctggaacaaaggg

SEQ ID NO: 2759 - DNA, 30 bp, Artificial Sequence
  Synthetic primer
acgttggatgatttggaagtgagtgggttc

SEQ ID NO: 2760 - DNA, 30 bp, Artificial Sequence
  Synthetic primer
acgttggatgagctgtcaggaaactctgag

SEQ ID NO: 2761 - DNA, 30 bp, Artificial Sequence
  Synthetic primer
acgttggatggagttccctgttccttctag

SEQ ID NO: 2762 - DNA, 30 bp, Artificial Sequence
  Synthetic primer
acgttggatgaaggaggggagaggaagatg

SEQ ID NO: 2763 - DNA, 30 bp, Artificial Sequence
  Synthetic primer
acgttggatgtctaaggcagttcccactcg

SEQ ID NO: 2764 - DNA, 30 bp, Artificial Sequence
  Synthetic primer
acgttggatgctcttcctgctgtgtgttgc

SEQ ID NO: 2765 - DNA, 30 bp, Artificial Sequence
  Synthetic primer
acgttggatgttccccttcacctggtatcc

SEQ ID NO: 2766 - DNA, 30 bp, Artificial Sequence
  Synthetic primer
acgttggatgctctgcaaagtggacagagc

SEQ ID NO: 2767 - DNA, 30 bp, Artificial Sequence
  Synthetic primer
acgttggatgcctggtatccaaaagcatgc

SEQ ID NO: 2768 - DNA, 30 bp, Artificial Sequence
  Synthetic primer
acgttggatgtttttagcctgtcgtggaag

SEQ ID NO: 2769 - DNA, 30 bp, Artificial Sequence
  Synthetic primer
acgttggatgctctggccagagccaacttc

SEQ ID NO: 2770 - DNA, 30 bp, Artificial Sequence
  Synthetic primer
acgttggatgagaactttgctgggcttcac

SEQ ID NO: 2771 - DNA, 30 bp, Artificial Sequence
  Synthetic primer
acgttggatgaacaggatttccacttccgg

SEQ ID NO: 2772 - DNA, 30 bp, Artificial Sequence
  Synthetic primer
acgttggatgatccagcatggtctttgcag

SEQ ID NO: 2773 - DNA, 30 bp, Artificial Sequence
  Synthetic primer
acgttggatgaatagctaccatggagtggg

SEQ ID NO: 2774 - DNA, 30 bp, Artificial Sequence
  Synthetic primer
acgttggatgtcacatgtctgtaaggtggg

SEQ ID NO: 2775 - DNA, 30 bp, Artificial Sequence
  Synthetic primer
acgttggatgggccaggatctttaccaatg

SEQ ID NO: 2776 - DNA, 30 bp, Artificial Sequence
  Synthetic primer
acgttggatgggctaatgcacacaagaagg

SEQ ID NO: 2777 - DNA, 30 bp, Artificial Sequence
  Synthetic primer
acgttggatgtaaacaagcactgcagagcc

SEQ ID NO: 2778 - DNA, 30 bp, Artificial Sequence
  Synthetic primer
acgttggatgcttttaagctattgtggcac

SEQ ID NO: 2779 - DNA, 30 bp, Artificial Sequence
  Synthetic primer
acgttggatgctccaaaggctaataattgg

SEQ ID NO: 2780 - DNA, 30 bp, Artificial Sequence
  Synthetic primer
acgttggatgaaagcaggctgtctccaaag

SEQ ID NO: 2781 - DNA, 30 bp, Artificial Sequence
  Synthetic primer
acgttggatgtggcacttgggaacatttgg

SEQ ID NO: 2782 - DNA, 30 bp, Artificial Sequence
  Synthetic primer
acgttggatgttccaacacacagagttctc

SEQ ID NO: 2783 - DNA, 30 bp, Artificial Sequence
  Synthetic primer
acgttggatgccaaacatgcaggactcttg

SEQ ID NO: 2784 - DNA, 30 bp, Artificial Sequence
  Synthetic primer
acgttggatgtggagatcctaaagcagagc

SEQ ID NO: 2785 - DNA, 30 bp, Artificial Sequence
  Synthetic primer
acgttggatgtttccttgcagttggtctgg

SEQ ID NO: 2786 - DNA, 30 bp, Artificial Sequence
  Synthetic primer
acgttggatgtcatctccactgcatgtctg

SEQ ID NO: 2787 - DNA, 30 bp, Artificial Sequence
  Synthetic primer
acgttggatgaaactgaggcacagtccaag

SEQ ID NO: 2788 - DNA, 30 bp, Artificial Sequence
  Synthetic primer
acgttggatggaggtgttagtcacagaagg

SEQ ID NO: 2789 - DNA, 30 bp, Artificial Sequence
  Synthetic primer
acgttggatgatcctacccccattttaggg

SEQ ID NO: 2790 - DNA, 30 bp, Artificial Sequence
  Synthetic primer
acgttggatgtaagtgctgggattacaggc

SEQ ID NO: 2791 - DNA, 30 bp, Artificial Sequence
  Synthetic primer
acgttggatgtcctttacgttacatgcctg

SEQ ID NO: 2792 - DNA, 30 bp, Artificial Sequence
  Synthetic primer
acgttggatgacctgtaatcccagctactc

SEQ ID NO: 2793 - DNA, 30 bp, Artificial Sequence
  Synthetic primer
acgttggatgatcttggctcactgcaacct

SEQ ID NO: 2794 - DNA, 30 bp, Artificial Sequence
  Synthetic primer
acgttggatgctgcaatctgatcgtatcac

SEQ ID NO: 2795 - DNA, 30 bp, Artificial Sequence
  Synthetic primer
acgttggatgttgtcatgctaaaacccgtc

SEQ ID NO: 2796 - DNA, 30 bp, Artificial Sequence
  Synthetic primer
acgttggatgtgaagagagcaggagagaag

SEQ ID NO: 2797 - DNA, 30 bp, Artificial Sequence
  Synthetic primer
acgttggatgtaggaccttcacttgccatc

SEQ ID NO: 2798 - DNA, 30 bp, Artificial Sequence
  Synthetic primer
acgttggatgagggatttaccctggatatc

SEQ ID NO: 2799 - DNA, 30 bp, Artificial Sequence
  Synthetic primer
acgttggatgatccaggaaccaggaatcac

SEQ ID NO: 2800 - DNA, 30 bp, Artificial Sequence
  Synthetic primer
acgttggatgctgaccatgtgagaggaatc

SEQ ID NO: 2801 - DNA, 30 bp, Artificial Sequence
  Synthetic primer
acgttggatgtttgttgacttggcagagcc

SEQ ID NO: 2802 - DNA, 30 bp, Artificial Sequence
  Synthetic primer
acgttggatgctgtaaagccaaagaccagc

SEQ ID NO: 2803 - DNA, 30 bp, Artificial Sequence
  Synthetic primer
acgttggatgtcattccttcctacagctgc

SEQ ID NO: 2804 - DNA, 30 bp, Artificial Sequence
  Synthetic primer
acgttggatgtaaccaaattcatttgcctc

SEQ ID NO: 2805 - DNA, 31 bp, Artificial Sequence
  Synthetic primer
acgttggatggtagagagctacatttctttg

SEQ ID NO: 2806 - DNA, 30 bp, Artificial Sequence
  Synthetic primer
acgttggatgaagtgattccaggtctggag

SEQ ID NO: 2807 - DNA, 30 bp, Artificial Sequence
  Synthetic primer
acgttggatgggatcctgagtccttttgac

SEQ ID NO: 2808 - DNA, 30 bp, Artificial Sequence
  Synthetic primer
acgttggatgctgcaccacaaatactgtac

SEQ ID NO: 2809 - DNA, 30 bp, Artificial Sequence
  Synthetic primer
acgttggatgtctagcatacgtagtttcag

SEQ ID NO: 2810 - DNA, 30 bp, Artificial Sequence
  Synthetic primer
acgttggatggtttctggtcctttgtcctc

SEQ ID NO: 2811 - DNA, 30 bp, Artificial Sequence
  Synthetic primer
acgttggatgtttggcagcatgtaccacag

SEQ ID NO: 2812 - DNA, 31 bp, Artificial Sequence
  Synthetic primer
acgttggatgcatgttaagaagatatcccac

SEQ ID NO: 2813 - DNA, 30 bp, Artificial Sequence
  Synthetic primer
acgttggatgtgattctttccctttgtcag

SEQ ID NO: 2814 - DNA, 30 bp, Artificial Sequence
  Synthetic primer
acgttggatgctctagccctaacaattgac

SEQ ID NO: 2815 - DNA, 30 bp, Artificial Sequence
  Synthetic primer
acgttggatgctcatgactgtatttgactg

SEQ ID NO: 2816 - DNA, 30 bp, Artificial Sequence
  Synthetic primer
acgttggatgggcccatacattgcaattag

SEQ ID NO: 2817 - DNA, 30 bp, Artificial Sequence
  Synthetic primer
acgttggatgtggagggaaaagtctatgtg

SEQ ID NO: 2818 - DNA, 30 bp, Artificial Sequence
  Synthetic primer
acgttggatgaggaagccagaaacaacagc

SEQ ID NO: 2819 - DNA, 30 bp, Artificial Sequence
  Synthetic primer
acgttggatggggcatcaatgtgtttccag

SEQ ID NO: 2820 - DNA, 30 bp, Artificial Sequence
  Synthetic primer
acgttggatggacgtagggaaaaaaatggg

SEQ ID NO: 2821 - DNA, 30 bp, Artificial Sequence
  Synthetic primer
acgttggatgtctgttttgcccttgatctg

SEQ ID NO: 2822 - DNA, 30 bp, Artificial Sequence
  Synthetic primer
acgttggatgtcatcaactggttacacctg

SEQ ID NO: 2823 - DNA, 30 bp, Artificial Sequence
  Synthetic primer
acgttggatgagatcaagggcaaaacagag

SEQ ID NO: 2824 - DNA, 30 bp, Artificial Sequence
  Synthetic primer
acgttggatgacttccttctgtagtccgtg

SEQ ID NO: 2825 - DNA, 30 bp, Artificial Sequence
  Synthetic primer
acgttggatgcctaaagtatccatgcccac

SEQ ID NO: 2826 - DNA, 30 bp, Artificial Sequence
  Synthetic primer
acgttggatgcttttaggatagacctggcc

SEQ ID NO: 2827 - DNA, 30 bp, Artificial Sequence
  Synthetic primer
acgttggatgacggactacagaaggaagtg

SEQ ID NO: 2828 - DNA, 30 bp, Artificial Sequence
  Synthetic primer
acgttggatgcttctatgtggcatggaagg

SEQ ID NO: 2829 - DNA, 30 bp, Artificial Sequence
  Synthetic primer
acgttggatgtctgggcagattctgatctg

SEQ ID NO: 2830 - DNA, 30 bp, Artificial Sequence
  Synthetic primer
acgttggatggtcagtaattggctttgccc

SEQ ID NO: 2831 - DNA, 30 bp, Artificial Sequence
  Synthetic primer
acgttggatgtggatgacattcccaagtcg

SEQ ID NO: 2832 - DNA, 30 bp, Artificial Sequence
  Synthetic primer
acgttggatgctaataaccctctcaaggtg

SEQ ID NO: 2833 - DNA, 30 bp, Artificial Sequence
  Synthetic primer
acgttggatgtttcaagaatatcagctggc

SEQ ID NO: 2834 - DNA, 30 bp, Artificial Sequence
  Synthetic primer
acgttggatgccagccagcttaggataact

SEQ ID NO: 2835 - DNA, 30 bp, Artificial Sequence
  Synthetic primer
acgttggatgttctgtctagcacaatggcc

SEQ ID NO: 2836 - DNA, 30 bp, Artificial Sequence
  Synthetic primer
acgttggatggtacatgtaaaactagtcac

SEQ ID NO: 2837 - DNA, 30 bp, Artificial Sequence
  Synthetic primer
acgttggatgagcacaatatcaaaaccagg

SEQ ID NO: 2838 - DNA, 30 bp, Artificial Sequence
  Synthetic primer
acgttggatggaggaaggaaggatgaaggg

SEQ ID NO: 2839 - DNA, 30 bp, Artificial Sequence
  Synthetic primer
acgttggatgcctcctaactagcttcctgg

SEQ ID NO: 2840 - DNA, 30 bp, Artificial Sequence
  Synthetic primer
acgttggatgtcttcaaacccgaagcaagg

SEQ ID NO: 2841 - DNA, 30 bp, Artificial Sequence
  Synthetic primer
acgttggatgtgctaaggcccatcttagtc

SEQ ID NO: 2842 - DNA, 30 bp, Artificial Sequence
  Synthetic primer
acgttggatgaatgagacttcttacctgcc

SEQ ID NO: 2843 - DNA, 30 bp, Artificial Sequence
  Synthetic primer
acgttggatggaaccttagaaacaagctgc

SEQ ID NO: 2844 - DNA, 30 bp, Artificial Sequence
  Synthetic primer
acgttggatgacaccaagttcaccactgac

SEQ ID NO: 2845 - DNA, 30 bp, Artificial Sequence
  Synthetic primer
acgttggatgcccggatgttcctctaaatg

SEQ ID NO: 2846 - DNA, 30 bp, Artificial Sequence
  Synthetic primer
acgttggatgcgtgcatagaaattggcagc

SEQ ID NO: 2847 - DNA, 30 bp, Artificial Sequence
  Synthetic primer
acgttggatgttgagtgagaaggcacacag

SEQ ID NO: 2848 - DNA, 30 bp, Artificial Sequence
  Synthetic primer
acgttggatggtttcatattcacagctgcc

SEQ ID NO: 2849 - DNA, 30 bp, Artificial Sequence
  Synthetic primer
acgttggatgcctaaaaggctggaaatacc

SEQ ID NO: 2850 - DNA, 30 bp, Artificial Sequence
  Synthetic primer
acgttggatgtgattgaattagggctccag

SEQ ID NO: 2851 - DNA, 30 bp, Artificial Sequence
  Synthetic primer
acgttggatgagaccatgctgattccaaag

SEQ ID NO: 2852 - DNA, 30 bp, Artificial Sequence
  Synthetic primer
acgttggatgtgattcttgccccacaacag

SEQ ID NO: 2853 - DNA, 30 bp, Artificial Sequence
  Synthetic primer
acgttggatgattgatgttgggctctgggc

SEQ ID NO: 2854 - DNA, 30 bp, Artificial Sequence
  Synthetic primer
acgttggatgaacagtgtgtgaaggtcagg

SEQ ID NO: 2855 - DNA, 30 bp, Artificial Sequence
  Synthetic primer
acgttggatgagcaaatgtcaaggcttggc

SEQ ID NO: 2856 - DNA, 30 bp, Artificial Sequence
  Synthetic primer
acgttggatgtcactgctgttttccaccag

SEQ ID NO: 2857 - DNA, 30 bp, Artificial Sequence
  Synthetic primer
acgttggatgcttcctactgtcctgagtac

SEQ ID NO: 2858 - DNA, 30 bp, Artificial Sequence; identical to SEQ ID NO: 2856
  Synthetic primer

SEQ ID NO: 2859 - DNA, 30 bp, Artificial Sequence; identical to SEQ ID NO: 2857
  Synthetic primer

SEQ ID NO: 2860 - DNA, 30 bp, Artificial Sequence; identical to SEQ ID NO: 348
  Synthetic primer

SEQ ID NO: 2861 - DNA, 30 bp, Artificial Sequence; identical to SEQ ID NO: 347
  Synthetic primer

SEQ ID NO: 2862 - DNA, 30 bp, Artificial Sequence
  Synthetic primer
acgttggatgcaagctgggccttaaaggat

SEQ ID NO: 2863 - DNA, 30 bp, Artificial Sequence
  Synthetic primer
acgttggatgtgcctttccctgtaatgctg

SEQ ID NO: 2864 - DNA, 30 bp, Artificial Sequence
  Synthetic primer
acgttggatggcagggaaaagaggaattgc

SEQ ID NO: 2865 - DNA, 30 bp, Artificial Sequence
  Synthetic primer
acgttggatgcatgcctacataagaggctc

SEQ ID NO: 2866 - DNA, 30 bp, Artificial Sequence
  Synthetic primer
acgttggatgtggatttagtgactggtccc

SEQ ID NO: 2867 - DNA, 30 bp, Artificial Sequence
  Synthetic primer
acgttggatggagatgagtctggtgatagg

SEQ ID NO: 2868 - DNA, 30 bp, Artificial Sequence
  Synthetic primer
acgttggatgagggagaagtatctggagag

SEQ ID NO: 2869 - DNA, 30 bp, Artificial Sequence
  Synthetic primer
acgttggatgcatctgtcacttgatggtgg

SEQ ID NO: 2870 - DNA, 30 bp, Artificial Sequence
  Synthetic primer
acgttggatggggaacacttctgtcctttc

SEQ ID NO: 2871 - DNA, 30 bp, Artificial Sequence
  Synthetic primer
acgttggatgtgagaggagcacaaaagacg

SEQ ID NO: 2872 - DNA, 30 bp, Artificial Sequence
  Synthetic primer
acgttggatgattgaaaggagccagtgagg

SEQ ID NO: 2873 - DNA, 30 bp, Artificial Sequence
  Synthetic primer
acgttggatgggaaggatcccctttttgtc

SEQ ID NO: 2874 - DNA, 30 bp, Artificial Sequence; identical to SEQ ID NO: 2872
  Synthetic primer

SEQ ID NO: 2875 - DNA, 30 bp, Artificial Sequence; identical to SEQ ID NO: 2873
  Synthetic primer

SEQ ID NO: 2876 - DNA, 30 bp, Artificial Sequence
  Synthetic primer
acgttggatgaaatcgggaggtggagaatg

SEQ ID NO: 2877 - DNA, 30 bp, Artificial Sequence
  Synthetic primer
acgttggatgacaatcgagacacccacaac

SEQ ID NO: 2878 - DNA, 30 bp, Artificial Sequence
  Synthetic primer
acgttggatgaatctgacctcctttcaggg

SEQ ID NO: 2879 - DNA, 30 bp, Artificial Sequence
  Synthetic primer
acgttggatgtaatgtctgccctgggtatg

SEQ ID NO: 2880 - DNA, 30 bp, Artificial Sequence
  Synthetic primer
acgttggatggtatgcaaactctagaccag

SEQ ID NO: 2881 - DNA, 30 bp, Artificial Sequence
  Synthetic primer
acgttggatgccaatctgcatggataagac

SEQ ID NO: 2882 - DNA, 30 bp, Artificial Sequence
  Synthetic primer
acgttggatgagagtgaaaccctatctctg

SEQ ID NO: 2883 - DNA, 30 bp, Artificial Sequence
  Synthetic primer
acgttggatgggtcacatacttctgtcttc

SEQ ID NO: 2884 - DNA, 30 bp, Artificial Sequence
  Synthetic primer
acgttggatgtcagagatagggtttcactc

SEQ ID NO: 2885 - DNA, 30 bp, Artificial Sequence
  Synthetic primer
acgttggatgggtgcagtgaaccaagattg

SEQ ID NO: 2886 - DNA, 30 bp, Artificial Sequence
  Synthetic primer
acgttggatgaaaattagccaggcatggtg

SEQ ID NO: 2887 - DNA, 30 bp, Artificial Sequence
  Synthetic primer
acgttggatgaatccttcctcctcagcatc

SEQ ID NO: 2888 - DNA, 30 bp, Artificial Sequence
  Synthetic primer
acgttggatgatcccttcttaccagcttgg

SEQ ID NO: 2889 - DNA, 30 bp, Artificial Sequence
  Synthetic primer
acgttggatgtacaggtatgtgccaccatg

SEQ ID NO: 2890 - DNA, 30 bp, Artificial Sequence
  Synthetic primer
acgttggatgaggaatgggttgatgccttc

SEQ ID NO: 2891 - DNA, 30 bp, Artificial Sequence
  Synthetic primer
acgttggatgccaagctggtaagaagggat

SEQ ID NO: 2892 - DNA, 30 bp, Artificial Sequence; identical to SEQ ID NO: 2891
  Synthetic primer

SEQ ID NO: 2893 - DNA, 30 bp, Artificial Sequence; identical to SEQ ID NO: 2890
  Synthetic primer

SEQ ID NO: 2894 - DNA, 30 bp, Artificial Sequence
  Synthetic primer
acgttggatgcttttctgtggtatggtggg

SEQ ID NO: 2895 - DNA, 30 bp, Artificial Sequence
  Synthetic primer
acgttggatgtagcattgcaagcctctttg

SEQ ID NO: 2896 - DNA, 30 bp, Artificial Sequence
  Synthetic primer
acgttggatggccacagctgcctttttaag

SEQ ID NO: 2897 - DNA, 30 bp, Artificial Sequence
  Synthetic primer
acgttggatggtgggatgcggcaaatactt

SEQ ID NO: 2898 - DNA, 30 bp, Artificial Sequence
  Synthetic primer
acgttggatgagtgagagacctttgtgtgc

SEQ ID NO: 2899 - DNA, 30 bp, Artificial Sequence
  Synthetic primer
acgttggatgcccaccataccacagaaaag

SEQ ID NO: 2900 - DNA, 30 bp, Artificial Sequence
  Synthetic primer
acgttggatgctcactatctctcaactccc

SEQ ID NO: 2901 - DNA, 30 bp, Artificial Sequence
  Synthetic primer
acgttggatgatgggcccacttttgtgtag

SEQ ID NO: 2902 - DNA, 30 bp, Artificial Sequence
  Synthetic primer
acgttggatgtgcagtccctaggtcagatc

SEQ ID NO: 2903 - DNA, 30 bp, Artificial Sequence
  Synthetic primer
acgttggatgtacactccggctacacaaaa

SEQ ID NO: 2904 - DNA, 30 bp, Artificial Sequence
  Synthetic primer
acgttggatgacaagatccccaggtgattc

SEQ ID NO: 2905 - DNA, 30 bp, Artificial Sequence
  Synthetic primer
acgttggatgagagagtgaagactgagtgg

SEQ ID NO: 2906 - DNA, 30 bp, Artificial Sequence
  Synthetic primer
acgttggatgttctctaccctctaacgcag

SEQ ID NO: 2907 - DNA, 30 bp, Artificial Sequence
  Synthetic primer
acgttggatgttagtggctgcagagctgta

SEQ ID NO: 2908 - DNA, 30 bp, Artificial Sequence
  Synthetic primer
acgttggatgaccaaagtcctgggaggatg

SEQ ID NO: 2909 - DNA, 30 bp, Artificial Sequence
  Synthetic primer
acgttggatgactcatgggcttggagtcag

SEQ ID NO: 2910 - DNA, 30 bp, Artificial Sequence
  Synthetic primer
acgttggatgatctgcttacagctctgcag

SEQ ID NO: 2911 - DNA, 30 bp, Artificial Sequence
  Synthetic primer
acgttggatgtctggatgcacttcgtaaag

SEQ ID NO: 2912 - DNA, 30 bp, Artificial Sequence
  Synthetic primer
acgttggatgctgatgactactgcttaccc

SEQ ID NO: 2913 - DNA, 30 bp, Artificial Sequence
  Synthetic primer
acgttggatgctgggatgtgtgtttgaagg

SEQ ID NO: 2914 - DNA, 31 bp, Artificial Sequence
  Synthetic primer
acgttggatggcaacctaattagattgcacc

SEQ ID NO: 2915 - DNA, 30 bp, Artificial Sequence
  Synthetic primer
acgttggatgttggctcaggtatattcctc

SEQ ID NO: 2916 - DNA, 30 bp, Artificial Sequence
  Synthetic primer
acgttggatgagccccagaacaagcattac

SEQ ID NO: 2917 - DNA, 30 bp, Artificial Sequence
  Synthetic primer
acgttggatgctcgtgatttttggctcagg

SEQ ID NO: 2918 - DNA, 30 bp, Artificial Sequence
  Synthetic primer
acgttggatgtttattgagggcagtgaggc

SEQ ID NO: 2919 - DNA, 30 bp, Artificial Sequence
  Synthetic primer
acgttggatgtatggtgagaagtggtactg

SEQ ID NO: 2920 - DNA, 30 bp, Artificial Sequence
  Synthetic primer
acgttggatgttctttaatctcgccaggag

SEQ ID NO: 2921 - DNA, 30 bp, Artificial Sequence
  Synthetic primer
acgttggatgataggtgcatgagcagtgac

SEQ ID NO: 2922 - DNA, 30 bp, Artificial Sequence
  Synthetic primer
acgttggatggcttgtttgtatgctggctg

SEQ ID NO: 2923 - DNA, 30 bp, Artificial Sequence
  Synthetic primer
acgttggatgcctgagaattttgctcctgc

SEQ ID NO: 2924 - DNA, 30 bp, Artificial Sequence
  Synthetic primer
acgttggatgttatgtggactcacttcccc

SEQ ID NO: 2925 - DNA, 30 bp, Artificial Sequence
  Synthetic primer
acgttggatgcagaaagaggttcatgctgg

SEQ ID NO: 2926 - DNA, 30 bp, Artificial Sequence
  Synthetic primer
acgttggatgttgtcatggtggttgggaac

SEQ ID NO: 2927 - DNA, 30 bp, Artificial Sequence
  Synthetic primer
acgttggatgtgggatgaggattttcccac

SEQ ID NO: 2928 - DNA, 30 bp, Artificial Sequence
  Synthetic primer
acgttggatgagagtgaggacagagagaag

SEQ ID NO: 2929 - DNA, 30 bp, Artificial Sequence
  Synthetic primer
acgttggatgcccttcttctctgtatcctg

SEQ ID NO: 2930 - DNA, 30 bp, Artificial Sequence
  Synthetic primer
acgttggatgagcgcctcataaagttgtag

SEQ ID NO: 2931 - DNA, 30 bp, Artificial Sequence
  Synthetic primer
acgttggatgctcaattgtctcactcatcc

SEQ ID NO: 2932 - DNA, 30 bp, Artificial Sequence
  Synthetic primer
acgttggatgttcccagtgcttgtttcctg

SEQ ID NO: 2933 - DNA, 30 bp, Artificial Sequence
  Synthetic primer
acgttggatgggcagagacaggatgaaaac

SEQ ID NO: 2934 - DNA, 30 bp, Artificial Sequence
  Synthetic primer
acgttggatgataaaggccctccctgaatg

SEQ ID NO: 2935 - DNA, 30 bp, Artificial Sequence
  Synthetic primer
acgttggatggatcctcgcctttaactctg

SEQ ID NO: 2936 - DNA, 30 bp, Artificial Sequence
  Synthetic primer
acgttggatggaaggaaacagacagcagag

SEQ ID NO: 2937 - DNA, 30 bp, Artificial Sequence
  Synthetic primer
acgttggatgagaaaagagactggataaag

SEQ ID NO: 2938 - DNA, 30 bp, Artificial Sequence
  Synthetic primer
acgttggatggggctgctccttcttcctgt

SEQ ID NO: 2939 - DNA, 31 bp, Artificial Sequence
  Synthetic primer
acgttggatgttctgatgtgcattcatcctt

SEQ ID NO: 2940 - DNA, 30 bp, Artificial Sequence
  Synthetic primer
acgttggatgactttcttcttccatccccc

SEQ ID NO: 2941 - DNA, 30 bp, Artificial Sequence
  Synthetic primer
acgttggatgagcctctctaagaagtgctc

SEQ ID NO: 2942 - DNA, 30 bp, Artificial Sequence
  Synthetic primer
acgttggatgtccccagatttctttgcctc

SEQ ID NO: 2943 - DNA, 30 bp, Artificial Sequence
  Synthetic primer
acgttggatgtggaggtggaatctcctttg

SEQ ID NO: 2944 - DNA, 29 bp, Artificial Sequence
  Synthetic primer
acgttggatgacgtggctggctgtgagac

SEQ ID NO: 2945 - DNA, 30 bp, Artificial Sequence
  Synthetic primer
acgttggatgaagaggcaaagaaatctggg

SEQ ID NO: 2946 - DNA, 30 bp, Artificial Sequence
  Synthetic primer
acgttggatggcaagagtgggaaatacctg

SEQ ID NO: 2947 - DNA, 30 bp, Artificial Sequence
  Synthetic primer
acgttggatgattcacgctcatctctgctc

SEQ ID NO: 2948 - DNA, 30 bp, Artificial Sequence
  Synthetic primer
acgttggatgtccagaacagaaaaggtgcc

SEQ ID NO: 2949 - DNA, 30 bp, Artificial Sequence
  Synthetic primer
acgttggatgaaaggcagtggtgattgctg

SEQ ID NO: 2950 - DNA, 30 bp, Artificial Sequence
  Synthetic primer
acgttggatgtctgcttcagaaaagaagtg

SEQ ID NO: 2951 - DNA, 30 bp, Artificial Sequence
  Synthetic primer
acgttggatgggtacaatccttgctacttc

SEQ ID NO: 2952 - DNA, 30 bp, Artificial Sequence
  Synthetic primer
acgttggatggaggtcattcaaccaaaatc

SEQ ID NO: 2953 - DNA, 30 bp, Artificial Sequence
  Synthetic primer
acgttggatgacatcatctttggtgcatgg

SEQ ID NO: 2954 - DNA, 30 bp, Artificial Sequence
  Synthetic primer
acgttggatgtgtcttgccactgcattcac

SEQ ID NO: 2955 - DNA, 30 bp, Artificial Sequence
  Synthetic primer
acgttggatgctgaagcaatgtctcaagcc

SEQ ID NO: 2956 - DNA, 30 bp, Artificial Sequence
  Synthetic primer
acgttggatggtcaacaaaaggcttgagac

SEQ ID NO: 2957 - DNA, 30 bp, Artificial Sequence
  Synthetic primer
acgttggatgggagaagattagtttcacgg

SEQ ID NO: 2958 - DNA, 30 bp, Artificial Sequence
  Synthetic primer
acgttggatgccccaactctatgcaagaga

SEQ ID NO: 2959 - DNA, 30 bp, Artificial Sequence
  Synthetic primer
acgttggatgcaagcagttcttttgacacc

SEQ ID NO: 2960 - DNA, 31 bp, Artificial Sequence
  Synthetic primer
acgttggatggaaagatcaggtaaccaaacg

SEQ ID NO: 2961 - DNA, 31 bp, Artificial Sequence
  Synthetic primer
acgttggatggaggagaaagagtcttcaaac

SEQ ID NO: 2962 - DNA, 30 bp, Artificial Sequence
  Synthetic primer
acgttggatgccaagttctaccctgtgatc

SEQ ID NO: 2963 - DNA, 30 bp, Artificial Sequence
  Synthetic primer
acgttggatggaagactctttctcctcctg

SEQ ID NO: 2964 - DNA, 30 bp, Artificial Sequence
  Synthetic primer
acgttggatgggttctagttacatggagtg

SEQ ID NO: 2965 - DNA, 30 bp, Artificial Sequence
  Synthetic primer
acgttggatggatgaccagttgtctattac

SEQ ID NO: 2966 - DNA, 30 bp, Artificial Sequence
  Synthetic primer
acgttggatgagtcaggatactgctagagg

SEQ ID NO: 2967 - DNA, 30 bp, Artificial Sequence
  Synthetic primer
acgttggatgggcatgccttgttcagattc

SEQ ID NO: 2968 - DNA, 30 bp, Artificial Sequence
  Synthetic primer
acgttggatgtatctttgggctgctcacag

SEQ ID NO: 2969 - DNA, 30 bp, Artificial Sequence
  Synthetic primer
acgttggatgcatcctggatctcctctatc

SEQ ID NO: 2970 - DNA, 30 bp, Artificial Sequence
  Synthetic primer
acgttggatgccgcatttagcttatccacg

SEQ ID NO: 2971 - DNA, 30 bp, Artificial Sequence
  Synthetic primer
acgttggatggtcactataggaagtgggtg

SEQ ID NO: 2972 - DNA, 30 bp, Artificial Sequence; identical to SEQ ID NO: 2970
  Synthetic primer

SEQ ID NO: 2973 - DNA, 30 bp, Artificial Sequence; identical to SEQ ID NO: 2971
  Synthetic primer

SEQ ID NO: 2974 - DNA, 30 bp, Artificial Sequence
  Synthetic primer
acgttggatgtcattgcatgtgtaaaccgc

SEQ ID NO: 2975 - DNA, 30 bp, Artificial Sequence
  Synthetic primer
acgttggatgtataggaagtgggtgatgtg

SEQ ID NO: 2976 - DNA, 30 bp, Artificial Sequence
  Synthetic primer
acgttggatgaaaaaaaccctaaggagggc

SEQ ID NO: 2977 - DNA, 30 bp, Artificial Sequence
  Synthetic primer
acgttggatgcgttatgccttgcattatgg

SEQ ID NO: 2978 - DNA, 30 bp, Artificial Sequence
  Synthetic primer
acgttggatgaacactgtgactcaaggacc

SEQ ID NO: 2979 - DNA, 30 bp, Artificial Sequence
  Synthetic primer
acgttggatgtttccctcccttgtaagcag

SEQ ID NO: 2980 - DNA, 30 bp, Artificial Sequence
  Synthetic primer
acgttggatgaattcagttgctggtgggag

SEQ ID NO: 2981 - DNA, 30 bp, Artificial Sequence
  Synthetic primer
acgttggatgtacatcccatcggccaaaac

SEQ ID NO: 2982 - DNA, 30 bp, Artificial Sequence
  Synthetic primer
acgttggatgattccttcctgagctagacc

SEQ ID NO: 2983 - DNA, 30 bp, Artificial Sequence
  Synthetic primer
acgttggatgaggcaagccccttttatctg

SEQ ID NO: 2984 - DNA, 31 bp, Artificial Sequence
  Synthetic primer
acgttggatgctctaaagaaaaatgccccac

SEQ ID NO: 2985 - DNA, 30 bp, Artificial Sequence
  Synthetic primer
acgttggatgtaaaaagcctgagagagcag

SEQ ID NO: 2986 - DNA, 30 bp, Artificial Sequence
  Synthetic primer
acgttggatggaacacaaacaaactgatgg

SEQ ID NO: 2987 - DNA, 30 bp, Artificial Sequence
  Synthetic primer
acgttggatgacttttgaagtaggaggtac

SEQ ID NO: 2988 - DNA, 30 bp, Artificial Sequence
  Synthetic primer
acgttggatgaatcagggtagtgtgtccag

SEQ ID NO: 2989 - DNA, 30 bp, Artificial Sequence
  Synthetic primer
acgttggatgtagcaactgacctgccctat

SEQ ID NO: 2990 - DNA, 30 bp, Artificial Sequence; identical to SEQ ID NO: 2989
  Synthetic primer

SEQ ID NO: 2991 - DNA, 30 bp, Artificial Sequence; identical to SEQ ID NO: 2988
  Synthetic primer

SEQ ID NO: 2992 - DNA, 30 bp, Artificial Sequence
  Synthetic primer
acgttggatgaagagatcagccaggaatag

SEQ ID NO: 2993 - DNA, 30 bp, Artificial Sequence
  Synthetic primer
acgttggatgtacaccacctgggaattgac

SEQ ID NO: 2994 - DNA, 30 bp, Artificial Sequence
  Synthetic primer
acgttggatggcagaactgggtgttagcaa

SEQ ID NO: 2995 - DNA, 30 bp, Artificial Sequence
  Synthetic primer
acgttggatgtaaaggtcctttctggggtg

SEQ ID NO: 2996 - DNA, 30 bp, Artificial Sequence
  Synthetic primer
acgttggatgttcccctccacttagaaacc

SEQ ID NO: 2997 - DNA, 30 bp, Artificial Sequence
  Synthetic primer
acgttggatgtttctacttggatggcaggg

SEQ ID NO: 2998 - DNA, 30 bp, Artificial Sequence
  Synthetic primer
acgttggatgtaaaacaccccagaaaggac

SEQ ID NO: 2999 - DNA, 30 bp, Artificial Sequence
  Synthetic primer
acgttggatgggctgaattggttctatacc

SEQ ID NO: 3000 - DNA, 30 bp, Artificial Sequence
  Synthetic primer
acgttggatgtgatgtcatctctctccctg

SEQ ID NO: 3001 - DNA, 30 bp, Artificial Sequence
  Synthetic primer
acgttggatgcaaatgaggcatctgatggg

SEQ ID NO: 3002 - DNA, 30 bp, Artificial Sequence
  Synthetic primer
acgttggatgggtatagaaccaattcagcc

SEQ ID NO: 3003 - DNA, 30 bp, Artificial Sequence
  Synthetic primer
acgttggatgaaggaagcagtgtccttttg

SEQ ID NO: 3004 - DNA, 30 bp, Artificial Sequence
  Synthetic primer
acgttggatgtggaactggtctcttggttg

SEQ ID NO: 3005 - DNA, 30 bp, Artificial Sequence
  Synthetic primer
acgttggatgtcacaagcactcacactcag

SEQ ID NO: 3006 - DNA, 30 bp, Artificial Sequence
  Synthetic primer
acgttggatgtaagctgagcgataagggag

SEQ ID NO: 3007 - DNA, 30 bp, Artificial Sequence
  Synthetic primer
acgttggatggagcttttttccttgctggc

SEQ ID NO: 3008 - DNA, 30 bp, Artificial Sequence
  Synthetic primer
acgttggatgttatggcacactggtgtcag

SEQ ID NO: 3009 - DNA, 30 bp, Artificial Sequence
  Synthetic primer
acgttggatgaacagatggcgtgttccttg

SEQ ID NO: 3010 - DNA, 30 bp, Artificial Sequence
  Synthetic primer
acgttggatgtcctatccttgacagtgctg

SEQ ID NO: 3011 - DNA, 30 bp, Artificial Sequence
  Synthetic primer
acgttggatgacctcggttcatttggcaac

SEQ ID NO: 3012 - DNA, 30 bp, Artificial Sequence
  Synthetic primer
acgttggatgtgttgtatccttctcagtgc

SEQ ID NO: 3013 - DNA, 30 bp, Artificial Sequence
  Synthetic primer
acgttggatgaaaggccaaatgtctgagtc

SEQ ID NO: 3014 - DNA, 30 bp, Artificial Sequence
  Synthetic primer
acgttggatgaacagcatccaagcctgaac

SEQ ID NO: 3015 - DNA, 30 bp, Artificial Sequence
  Synthetic primer
acgttggatgccatgtcctcttacaagtcc

SEQ ID NO: 3016 - DNA, 30 bp, Artificial Sequence
  Synthetic primer
acgttggatgggtgtctttgatctggtgtg

SEQ ID NO: 3017 - DNA, 30 bp, Artificial Sequence
  Synthetic primer
acgttggatgaattcacacagggagctgag

SEQ ID NO: 3018 - DNA, 30 bp, Artificial Sequence
  Synthetic primer
acgttggatgcctaacagatgagtctgctc

SEQ ID NO: 3019 - DNA, 30 bp, Artificial Sequence
  Synthetic primer
acgttggatgcccagtatacctcctgttac

SEQ ID NO: 3020 - DNA, 30 bp, Artificial Sequence
  Synthetic primer
acgttggatgcatccctttaagggttcctg

SEQ ID NO: 3021 - DNA, 30 bp, Artificial Sequence
  Synthetic primer
acgttggatgccctccagtgctgtataaag

SEQ ID NO: 3022 - DNA, 30 bp, Artificial Sequence
  Synthetic primer
acgttggatgttactgagctgagggcaaag

SEQ ID NO: 3023 - DNA, 30 bp, Artificial Sequence
  Synthetic primer
acgttggatgacacacctttctgttgttgc

SEQ ID NO: 3024 - DNA, 30 bp, Artificial Sequence
  Synthetic primer
acgttggatgtgtccttggtttccaaccac

SEQ ID NO: 3025 - DNA, 30 bp, Artificial Sequence
  Synthetic primer
acgttggatgcccagaataatgcctcacac

SEQ ID NO: 3026 - DNA, 30 bp, Artificial Sequence
  Synthetic primer
acgttggatgagttaagttggagggactgg

SEQ ID NO: 3027 - DNA, 30 bp, Artificial Sequence
  Synthetic primer
acgttggatgttctctctcggagcttcctt

SEQ ID NO: 3028 - DNA, 30 bp, Artificial Sequence
  Synthetic primer
acgttggatgatccctgcatttggaagtcg

SEQ ID NO: 3029 - DNA, 30 bp, Artificial Sequence
  Synthetic primer
acgttggatgcgtcagtagagctgctgttt

SEQ ID NO: 3030 - DNA, 30 bp, Artificial Sequence
  Synthetic primer
acgttggatgaccgggttaatccctttggt

SEQ ID NO: 3031 - DNA, 30 bp, Artificial Sequence
  Synthetic primer
acgttggatgtgggttaagcaacagacagc

SEQ ID NO: 3032 - DNA, 30 bp, Artificial Sequence
  Synthetic primer
acgttggatgaagcctcttccctggaaatg

SEQ ID NO: 3033 - DNA, 30 bp, Artificial Sequence
  Synthetic primer
acgttggatggcacaccaaagggattaacc

SEQ ID NO: 3034 - DNA, 30 bp, Artificial Sequence
  Synthetic primer
acgttggatggatctgcatccacatacatg

SEQ ID NO: 3035 - DNA, 30 bp, Artificial Sequence
  Synthetic primer
acgttggatgtaaccgatacctgggcatgg

SEQ ID NO: 3036 - DNA, 31 bp, Artificial Sequence
  Synthetic primer
acgttggatgccctaataaatcagagcatcc

SEQ ID NO: 3037 - DNA, 30 bp, Artificial Sequence
  Synthetic primer
acgttggatgttatacaagagcagtcctgg

SEQ ID NO: 3038 - DNA, 30 bp, Artificial Sequence
  Synthetic primer
acgttggatgtcaagggtggtccatttgtg

SEQ ID NO: 3039 - DNA, 30 bp, Artificial Sequence
  Synthetic primer
acgttggatgtgtcttctacgctagcatcc

SEQ ID NO: 3040 - DNA, 30 bp, Artificial Sequence
  Synthetic primer
acgttggatgaaatgacctcccatcagtgc

SEQ ID NO: 3041 - DNA, 30 bp, Artificial Sequence
  Synthetic primer
acgttggatgcattgggaacagtgctcttg

SEQ ID NO: 3042 - DNA, 30 bp, Artificial Sequence
  Synthetic primer
acgttggatgtagaagcctgggtctagttc

SEQ ID NO: 3043 - DNA, 30 bp, Artificial Sequence
  Synthetic primer
acgttggatggaagtccagacccattgatc

SEQ ID NO: 3044 - DNA, 30 bp, Artificial Sequence
  Synthetic primer
acgttggatgaatagcacctgtccttatgc

SEQ ID NO: 3045 - DNA, 30 bp, Artificial Sequence
  Synthetic primer
acgttggatgggaagtatttctctccatgc

SEQ ID NO: 3046 - DNA, 30 bp, Artificial Sequence
  Synthetic primer
acgttggatggggagctgcaattcaagatg

SEQ ID NO: 3047 - DNA, 30 bp, Artificial Sequence
  Synthetic primer
acgttggatgcctcatgacgtatgaggatg

SEQ ID NO: 3048 - DNA, 30 bp, Artificial Sequence
  Synthetic primer
acgttggatgaagatgtgcctttgctcctc

SEQ ID NO: 3049 - DNA, 30 bp, Artificial Sequence
  Synthetic primer
acgttggatgtaatggactcacagttccac

SEQ ID NO: 3050 - DNA, 30 bp, Artificial Sequence
  Synthetic primer
acgttggatgactgtgccacccactaacat

SEQ ID NO: 3051 - DNA, 30 bp, Artificial Sequence
  Synthetic primer
acgttggatgtctaacccgttgttggaacc

SEQ ID NO: 3052 - DNA, 30 bp, Artificial Sequence
  Synthetic primer
acgttggatggcagtgaatgatatccggtg

SEQ ID NO: 3053 - DNA, 30 bp, Artificial Sequence
  Synthetic primer
acgttggatggtgactttagagagggatgg

SEQ ID NO: 3054 - DNA, 31 bp, Artificial Sequence
  Synthetic primer
acgttggatggctttgggcttcgtaaatatc

SEQ ID NO: 3055 - DNA, 30 bp, Artificial Sequence
  Synthetic primer
acgttggatgaaacactttgcagccatacc

SEQ ID NO: 3056 - DNA, 30 bp, Artificial Sequence
  Synthetic primer
acgttggatgtccataaaactaccgcccag

SEQ ID NO: 3057 - DNA, 30 bp, Artificial Sequence
  Synthetic primer
acgttggatgcctgccagtcattctttctg

SEQ ID NO: 3058 - DNA, 30 bp, Artificial Sequence
  Synthetic primer
acgttggatgagggcctggtgtgcacaaat

SEQ ID NO: 3059 - DNA, 30 bp, Artificial Sequence
  Synthetic primer
acgttggatgtccagaaatggagctgctca

SEQ ID NO: 3060 - DNA, 30 bp, Artificial Sequence
  Synthetic primer
acgttggatgtgactctcagcaccaacttc

SEQ ID NO: 3061 - DNA, 30 bp, Artificial Sequence
  Synthetic primer
acgttggatgagacctgaggatttggaagg

SEQ ID NO: 3062 - DNA, 30 bp, Artificial Sequence
  Synthetic primer
acgttggatgggctttaattggtgtgacag

SEQ ID NO: 3063 - DNA, 30 bp, Artificial Sequence
  Synthetic primer
acgttggatgatggcatctatctcataggc

SEQ ID NO: 3064 - DNA, 30 bp, Artificial Sequence
  Synthetic primer
acgttggatgatgtcacccggaagtcattc

SEQ ID NO: 3065 - DNA, 30 bp, Artificial Sequence
  Synthetic primer
acgttggatgccatatgcctcatggatcac

SEQ ID NO: 3066 - DNA, 30 bp, Artificial Sequence
  Synthetic primer
acgttggatgcactctcatgctctcaacac

SEQ ID NO: 3067 - DNA, 30 bp, Artificial Sequence
  Synthetic primer
acgttggatgcagatgcaaaacacagaccc

SEQ ID NO: 3068 - DNA, 30 bp, Artificial Sequence
  Synthetic primer
acgttggatgaaaagcttgagcctgaagtg

SEQ ID NO: 3069 - DNA, 30 bp, Artificial Sequence
  Synthetic primer
acgttggatgagagagggagaaaatgtagg

SEQ ID NO: 3070 - DNA, 30 bp, Artificial Sequence
  Synthetic primer
acgttggatgaaattccatcgactgggtgg

SEQ ID NO: 3071 - DNA, 30 bp, Artificial Sequence
  Synthetic primer
acgttggatgccttgatcttggacttccag

SEQ ID NO: 3072 - DNA, 30 bp, Artificial Sequence
  Synthetic primer
acgttggatgttaagggacatcggtaggac

SEQ ID NO: 3073 - DNA, 30 bp, Artificial Sequence
  Synthetic primer
acgttggatgatgtcaggactttggaaccc

SEQ ID NO: 3074 - DNA, 30 bp, Artificial Sequence
  Synthetic primer
acgttggatgaagccattgccctaggattg

SEQ ID NO: 3075 - DNA, 30 bp, Artificial Sequence
  Synthetic primer
acgttggatgttaggcccaaaatgcgagag

SEQ ID NO: 3076 - DNA, 30 bp, Artificial Sequence
  Synthetic primer
acgttggatgactggaagatggcagattgc

SEQ ID NO: 3077 - DNA, 30 bp, Artificial Sequence
  Synthetic primer
acgttggatgtctacatccttgaccctgtg

SEQ ID NO: 3078 - DNA, 30 bp, Artificial Sequence
  Synthetic primer
acgttggatgaatttccctcttaggagctc

SEQ ID NO: 3079 - DNA, 31 bp, Artificial Sequence
  Synthetic primer
acgttggatgcatctgtttggagtcttattg

SEQ ID NO: 3080 - DNA, 30 bp, Artificial Sequence
  Synthetic primer
acgttggatgttaggactactgcattaggg

SEQ ID NO: 3081 - DNA, 30 bp, Artificial Sequence
  Synthetic primer
acgttggatgtccttctcattctccaatgg

SEQ ID NO: 3082 - DNA, 30 bp, Artificial Sequence
  Synthetic primer
acgttggatgaatccactgccactcctgat

SEQ ID NO: 3083 - DNA, 30 bp, Artificial Sequence
  Synthetic primer
acgttggatgtgagagactgagggagaaac

SEQ ID NO: 3084 - DNA, 30 bp, Artificial Sequence
  Synthetic primer
acgttggatgccagaatcctcacaaacacc

SEQ ID NO: 3085 - DNA, 30 bp, Artificial Sequence
  Synthetic primer
acgttggatgcccactagcaaaactgggtt

SEQ ID NO: 3086 - DNA, 30 bp, Artificial Sequence
  Synthetic primer
acgttggatgtctggaaccttcttcgtgtg

SEQ ID NO: 3087 - DNA, 30 bp, Artificial Sequence
  Synthetic primer
acgttggatggccaagggtttaaaacctcc

SEQ ID NO: 3088 - DNA, 31 bp, Artificial Sequence
  Synthetic primer
acgttggatgcacatatgcacatgtgcacac

SEQ ID NO: 3089 - DNA, 30 bp, Artificial Sequence
  Synthetic primer
acgttggatggcgtgtgtatacgtgttgtg

SEQ ID NO: 3090 - DNA, 30 bp, Artificial Sequence
  Synthetic primer
acgttggatgtgtagcctcattatgagccg

SEQ ID NO: 3091 - DNA, 30 bp, Artificial Sequence
  Synthetic primer
acgttggatgcacaacacgtatacacacgc

SEQ ID NO: 3092 - DNA, 30 bp, Artificial Sequence
  Synthetic primer
acgttggatgtcctttattcatgccctggg

SEQ ID NO: 3093 - DNA, 30 bp, Artificial Sequence
  Synthetic primer
acgttggatgaatgaggctacaggagaacc

SEQ ID NO: 3094 - DNA, 30 bp, Artificial Sequence
  Synthetic primer
acgttggatgataaagaacacacctgtggc

SEQ ID NO: 3095 - DNA, 30 bp, Artificial Sequence
  Synthetic primer
acgttggatgagaaggcaatattacgaggg

SEQ ID NO: 3096 - DNA, 30 bp, Artificial Sequence
  Synthetic primer
acgttggatgcacacattcgaaatgcctgc

SEQ ID NO: 3097 - DNA, 30 bp, Artificial Sequence
  Synthetic primer
acgttggatgcccctctacaacaaaaccac

SEQ ID NO: 3098 - DNA, 30 bp, Artificial Sequence
  Synthetic primer
acgttggatgatgtgctgtagtgtgttggc

SEQ ID NO: 3099 - DNA, 30 bp, Artificial Sequence
  Synthetic primer
acgttggatgattgctaagcctagggttgg

SEQ ID NO: 3100 - DNA, 31 bp, Artificial Sequence
  Synthetic primer
acgttggatgggtggatttagtgtttcactg

SEQ ID NO: 3101 - DNA, 30 bp, Artificial Sequence
  Synthetic primer
acgttggatggcaggaataagaagaactac

SEQ ID NO: 3102 - DNA, 31 bp, Artificial Sequence
  Synthetic primer
acgttggatggtttagaacgatgtatctggc

SEQ ID NO: 3103 - DNA, 30 bp, Artificial Sequence
  Synthetic primer
acgttggatgagatgctgaaagggtagttg

SEQ ID NO: 3104 - DNA, 30 bp, Artificial Sequence
  Synthetic primer
acgttggatgatagtcactgggtcaccaac

SEQ ID NO: 3105 - DNA, 30 bp, Artificial Sequence
  Synthetic primer
acgttggatgaagagggactttgacccttg

SEQ ID NO: 3106 - DNA, 30 bp, Artificial Sequence
  Synthetic primer
acgttggatgattctctcttcctctctctc

SEQ ID NO: 3107 - DNA, 31 bp, Artificial Sequence
  Synthetic primer
acgttggatgcctgagtcacatggaattaag

SEQ ID NO: 3108 - DNA, 30 bp, Artificial Sequence
  Synthetic primer
acgttggatgaatggagttgtccagaacag

SEQ ID NO: 3109 - DNA, 30 bp, Artificial Sequence
  Synthetic primer
acgttggatgtcactgttgcttaatcacac

SEQ ID NO: 3110 - DNA, 30 bp, Artificial Sequence
  Synthetic primer
acgttggatgatacagaaccattttgtggg

SEQ ID NO: 3111 - DNA, 30 bp, Artificial Sequence
  Synthetic primer
acgttggatgagcttaatgtgggtagaagg

SEQ ID NO: 3112 - DNA, 30 bp, Artificial Sequence
  Synthetic primer
acgttggatgcagaaccattttgtgggaag

SEQ ID NO: 3113 - DNA, 30 bp, Artificial Sequence
  Synthetic primer
acgttggatggagcttaatgtgggtagaag

SEQ ID NO: 3114 - DNA, 30 bp, Artificial Sequence
  Synthetic primer
acgttggatgtgcacaagtcctcattgttg

SEQ ID NO: 3115 - DNA, 30 bp, Artificial Sequence
  Synthetic primer
acgttggatggattgtagggcagaatatgg

SEQ ID NO: 3116 - DNA, 30 bp, Artificial Sequence
  Synthetic primer
acgttggatgtgtatgcatctctcccactg

SEQ ID NO: 3117 - DNA, 30 bp, Artificial Sequence
  Synthetic primer
acgttggatgttgagcacctgccacaagtg

SEQ ID NO: 3118 - DNA, 30 bp, Artificial Sequence
  Synthetic primer
acgttggatgacttgaagcacttggagtgg

SEQ ID NO: 3119 - DNA, 30 bp, Artificial Sequence
  Synthetic primer
acgttggatgaatgacaccaccagtcacag

SEQ ID NO: 3120 - DNA, 30 bp, Artificial Sequence
  Synthetic primer
acgttggatggccagtcaaagcaggatttc

SEQ ID NO: 3121 - DNA, 30 bp, Artificial Sequence
  Synthetic primer
acgttggatggaggaagagtgaagacttcc

SEQ ID NO: 3122 - DNA, 30 bp, Artificial Sequence
  Synthetic primer
acgttggatgattgggaagtgggcaaacac

SEQ ID NO: 3123 - DNA, 30 bp, Artificial Sequence
  Synthetic primer
acgttggatgttgccttctctttctccttc

SEQ ID NO: 3124 - DNA, 30 bp, Artificial Sequence
  Synthetic primer
acgttggatgttgctctcggcaagaaggag

SEQ ID NO: 3125 - DNA, 30 bp, Artificial Sequence
  Synthetic primer
acgttggatgtgtatagcacagtgcccagg

SEQ ID NO: 3126 - DNA, 30 bp, Artificial Sequence; identical to SEQ ID NO: 3124
  Synthetic primer

SEQ ID NO: 3127 - DNA, 30 bp, Artificial Sequence; identical to SEQ ID NO: 3125
  Synthetic primer

SEQ ID NO: 3128 - DNA, 30 bp, Artificial Sequence
  Synthetic primer
acgttggatgtacttccaaaagccacctgc

SEQ ID NO: 3129 - DNA, 30 bp, Artificial Sequence
  Synthetic primer
acgttggatgaaaagcctggccagttgaag

SEQ ID NO: 3130 - DNA, 30 bp, Artificial Sequence; identical to SEQ ID NO: 3128
  Synthetic primer

SEQ ID NO: 3131 - DNA, 30 bp, Artificial Sequence
  Synthetic primer
acgttggatgaagcctggccagttgaagtg

SEQ ID NO: 3132 - DNA, 30 bp, Artificial Sequence
  Synthetic primer
acgttggatgttcctatcacagttgaggag

SEQ ID NO: 3133 - DNA, 30 bp, Artificial Sequence
  Synthetic primer
acgttggatgagtcctttgcattctagcac

SEQ ID NO: 3134 - DNA, 30 bp, Artificial Sequence
  Synthetic primer
acgttggatggacaatcctagggacatctc

SEQ ID NO: 3135 - DNA, 30 bp, Artificial Sequence
  Synthetic primer
acgttggatgtcatcaggcttcaggctttc

SEQ ID NO: 3136 - DNA, 30 bp, Artificial Sequence
  Synthetic primer
acgttggatgttgcagtagggtttgtgctc

SEQ ID NO: 3137 - DNA, 30 bp, Artificial Sequence
  Synthetic primer
acgttggatgatcactcgcattaccacctg

SEQ ID NO: 3138 - DNA, 30 bp, Artificial Sequence
  Synthetic primer
acgttggatgttgggtactgtggctctaag

SEQ ID NO: 3139 - DNA, 30 bp, Artificial Sequence
  Synthetic primer
acgttggatgagcatgtgggtagggagatt

SEQ ID NO: 3140 - DNA, 30 bp, Artificial Sequence
  Synthetic primer
acgttggatggtgagcactgaaggaacagg

SEQ ID NO: 3141 - DNA, 30 bp, Artificial Sequence
  Synthetic primer
acgttggatgtgcactctctgacacagcag

SEQ ID NO: 3142 - DNA, 30 bp, Artificial Sequence
  Synthetic primer
acgttggatgctagttctagatccctgagg

SEQ ID NO: 3143 - DNA, 30 bp, Artificial Sequence
  Synthetic primer
acgttggatgaaagcactgcccctgtaaac

SEQ ID NO: 3144 - DNA, 30 bp, Artificial Sequence
  Synthetic primer
acgttggatggcacacagaagacgactaag

SEQ ID NO: 3145 - DNA, 30 bp, Artificial Sequence
  Synthetic primer
acgttggatggttcctgatgtatcactgag

SEQ ID NO: 3146 - DNA, 30 bp, Artificial Sequence
  Synthetic primer
acgttggatgcctgatgtatcactgagtgg

SEQ ID NO: 3147 - DNA, 30 bp, Artificial Sequence; identical to SEQ ID NO: 3144
  Synthetic primer

SEQ ID NO: 3148 - DNA, 30 bp, Artificial Sequence
  Synthetic primer
acgttggatgagcttgaagcgaaaagcacg

SEQ ID NO: 3149 - DNA, 30 bp, Artificial Sequence
  Synthetic primer
acgttggatgcagggagagttagatgactc

SEQ ID NO: 3150 - DNA, 30 bp, Artificial Sequence
  Synthetic primer
acgttggatgtacacaccctaagcacctac

SEQ ID NO: 3151 - DNA, 30 bp, Artificial Sequence
  Synthetic primer
acgttggatgaagggaagcagtgtaggaag

SEQ ID NO: 3152 - DNA, 30 bp, Artificial Sequence
  Synthetic primer
acgttggatgcaagcaaactctctatcacc

SEQ ID NO: 3153 - DNA, 30 bp, Artificial Sequence
  Synthetic primer
acgttggatgttgctccaagcttcctttgc

SEQ ID NO: 3154 - DNA, 30 bp, Artificial Sequence
  Synthetic primer
acgttggatgagccacccattttgcaaagg

SEQ ID NO: 3155 - DNA, 30 bp, Artificial Sequence
  Synthetic primer
acgttggatgatttaacccttcctggaatg

SEQ ID NO: 3156 - DNA, 30 bp, Artificial Sequence
  Synthetic primer
acgttggatgcccctttctgggtttatgtg

SEQ ID NO: 3157 - DNA, 30 bp, Artificial Sequence
  Synthetic primer
acgttggatgttggagcaagaacacacagg

SEQ ID NO: 3158 - DNA, 30 bp, Artificial Sequence
  Synthetic primer
acgttggatgattcccttccaggtctacac

SEQ ID NO: 3159 - DNA, 30 bp, Artificial Sequence
  Synthetic primer
acgttggatgtatgtccgctgctctttgag

SEQ ID NO: 3160 - DNA, 30 bp, Artificial Sequence
  Synthetic primer
acgttggatggtgctgccaaaaggcatcag

SEQ ID NO: 3161 - DNA, 30 bp, Artificial Sequence
  Synthetic primer
acgttggatggtaacgtctccaccccaaag

SEQ ID NO: 3162 - DNA, 30 bp, Artificial Sequence
  Synthetic primer
acgttggatgtgacagtaagtatgggccgg

SEQ ID NO: 3163 - DNA, 30 bp, Artificial Sequence
  Synthetic primer
acgttggatgaaggaagcacagggaagagg

SEQ ID NO: 3164 - DNA, 30 bp, Artificial Sequence
  Synthetic primer
acgttggatgggcttcagtcctttggtttg

SEQ ID NO: 3165 - DNA, 30 bp, Artificial Sequence
  Synthetic primer
acgttggatgttgctcacctgtatcacctc

SEQ ID NO: 3166 - DNA, 30 bp, Artificial Sequence
  Synthetic primer
acgttggatgagtgaagctaggaggctaag

SEQ ID NO: 3167 - DNA, 30 bp, Artificial Sequence
  Synthetic primer
acgttggatgagctgtactgaaaagccctc

SEQ ID NO: 3168 - DNA, 30 bp, Artificial Sequence
  Synthetic primer
acgttggatgagccctcctctaccaaattc

SEQ ID NO: 3169 - DNA, 30 bp, Artificial Sequence; identical to SEQ ID NO: 3166
  Synthetic primer

SEQ ID NO: 3170 - DNA, 30 bp, Artificial Sequence
  Synthetic primer
acgttggatgtgctccttagcctcctagct

SEQ ID NO: 3171 - DNA, 30 bp, Artificial Sequence
  Synthetic primer
acgttggatgtacgtgcatcagctggtctg

SEQ ID NO: 3172 - DNA, 30 bp, Artificial Sequence
  Synthetic primer
acgttggatgtcaggactgtctggctcttg

SEQ ID NO: 3173 - DNA, 30 bp, Artificial Sequence
  Synthetic primer
acgttggatgtatcaggagcaaggcctgac

SEQ ID NO: 3174 - DNA, 31 bp, Artificial Sequence
  Synthetic primer
acgttggatgagacagtcctgacatccaggc

SEQ ID NO: 3175 - DNA, 30 bp, Artificial Sequence
  Synthetic primer
acgttggatgtactgagtaggccaagcatg

SEQ ID NO: 3176 - DNA, 30 bp, Artificial Sequence
  Synthetic primer
acgttggatgtcctcagcttgtctctctcc

SEQ ID NO: 3177 - DNA, 30 bp, Artificial Sequence
  Synthetic primer
acgttggatgtcaactctgagtaatgaggg

SEQ ID NO: 3178 - DNA, 30 bp, Artificial Sequence
  Synthetic primer
acgttggatgacatgcaagggactcttcct

SEQ ID NO: 3179 - DNA, 30 bp, Artificial Sequence
  Synthetic primer
acgttggatgaggccaagtaggattctgag

SEQ ID NO: 3180 - DNA, 30 bp, Artificial Sequence
  Synthetic primer
acgttggatgactcagaatcctacttggcc

SEQ ID NO: 3181 - DNA, 30 bp, Artificial Sequence
  Synthetic primer
acgttggatgagggtgtgagtggatgtaag

SEQ ID NO: 3182 - DNA, 30 bp, Artificial Sequence
  Synthetic primer
acgttggatggatgtgttgagtgcttcctg

SEQ ID NO: 3183 - DNA, 30 bp, Artificial Sequence
  Synthetic primer
acgttggatggctgttgagagagtttgagc

SEQ ID NO: 3184 - DNA, 30 bp, Artificial Sequence
  Synthetic primer
acgttggatgtccttgagggcaaaaatggc

SEQ ID NO: 3185 - DNA, 30 bp, Artificial Sequence
  Synthetic primer
acgttggatgtgcaaaagagctttgcacgc

SEQ ID NO: 3186 - DNA, 30 bp, Artificial Sequence
  Synthetic primer
acgttggatgagaggaatgaagtagggtgg

SEQ ID NO: 3187 - DNA, 30 bp, Artificial Sequence
  Synthetic primer
acgttggatggtctccaggctctgttatag

SEQ ID NO: 3188 - DNA, 30 bp, Artificial Sequence
  Synthetic primer
acgttggatgaggaagaatgaaggagggag

SEQ ID NO: 3189 - DNA, 30 bp, Artificial Sequence
  Synthetic primer
acgttggatgatggcagggacttagcattg

SEQ ID NO: 3190 - DNA, 30 bp, Artificial Sequence
  Synthetic primer
acgttggatgaagacccttgactaggacag

SEQ ID NO: 3191 - DNA, 30 bp, Artificial Sequence
  Synthetic primer
acgttggatgtgggccacactgtttgagaa

SEQ ID NO: 3192 - DNA, 30 bp, Artificial Sequence
  Synthetic primer
acgttggatgtgagaaccactgctctacac

SEQ ID NO: 3193 - DNA, 30 bp, Artificial Sequence
  Synthetic primer
acgttggatgatgacagagtgactccgtct

SEQ ID NO: 3194 - DNA, 30 bp, Artificial Sequence
  Synthetic primer
acgttggatgagtgcagtggctcaatctcg

SEQ ID NO: 3195 - DNA, 30 bp, Artificial Sequence
  Synthetic primer
acgttggatgctgaggcggagaatcacttg

SEQ ID NO: 3196 - DNA, 30 bp, Artificial Sequence
  Synthetic primer
acgttggatgccaggatggtctcaatctcc

SEQ ID NO: 3197 - DNA, 31 bp, Artificial Sequence
  Synthetic primer
acgttggatgacggtggctcacacctgtaat

SEQ ID NO: 3198 - DNA, 30 bp, Artificial Sequence
  Synthetic primer
acgttggatgtcccaagtagctgtaaccag

SEQ ID NO: 3199 - DNA, 30 bp, Artificial Sequence
  Synthetic primer
acgttggatgcaacatggtgagaactcatc

SEQ ID NO: 3200 - DNA, 30 bp, Artificial Sequence
  Synthetic primer
acgttggatgagggctaaggtagggattac

SEQ ID NO: 3201 - DNA, 30 bp, Artificial Sequence
  Synthetic primer
acgttggatgagtggtagagctggaatttg

SEQ ID NO: 3202 - DNA, 30 bp, Artificial Sequence
  Synthetic primer
acgttggatgtgcactcacagcctcagttc

SEQ ID NO: 3203 - DNA, 30 bp, Artificial Sequence
  Synthetic primer
acgttggatggaggcccccatctctaaaac

SEQ ID NO: 3204 - DNA, 30 bp, Artificial Sequence
  Synthetic primer
acgttggatgtgaagaggaccatttcccac

SEQ ID NO: 3205 - DNA, 30 bp, Artificial Sequence
  Synthetic primer
acgttggatgaaagagctgtgcatgtccag

SEQ ID NO: 3206 - DNA, 30 bp, Artificial Sequence; identical to SEQ ID NO: 3205
  Synthetic primer

SEQ ID NO: 3207 - DNA, 30 bp, Artificial Sequence
  Synthetic primer
acgttggatgaggaccatttcccacacttg

SEQ ID NO: 3208 - DNA, 30 bp, Artificial Sequence
  Synthetic primer
acgttggatgaaggagactttcgagcttgg

SEQ ID NO: 3209 - DNA, 30 bp, Artificial Sequence
  Synthetic primer
acgttggatgaaggaaagcaagtgggtctg

SEQ ID NO: 3210 - DNA, 30 bp, Artificial Sequence
  Synthetic primer
acgttggatgtttgggagttcaccaaaggc

SEQ ID NO: 3211 - DNA, 30 bp, Artificial Sequence
  Synthetic primer
acgttggatgaaactggcctagacccattc

SEQ ID NO: 3212 - DNA, 30 bp, Artificial Sequence
  Synthetic primer
acgttggatgtacagaagaggtatgctgtg

SEQ ID NO: 3213 - DNA, 30 bp, Artificial Sequence
  Synthetic primer
acgttggatgtagtcccttatcatttcccc

SEQ ID NO: 3214 - DNA, 30 bp, Artificial Sequence
  Synthetic primer
acgttggatggcctgggaacttgcttctaa

SEQ ID NO: 3215 - DNA, 30 bp, Artificial Sequence
  Synthetic primer
acgttggatgaggaccccactcagaaattc

SEQ ID NO: 3216 - DNA, 30 bp, Artificial Sequence
  Synthetic primer
acgttggatgtaagtgcttatccgtgggag

SEQ ID NO: 3217 - DNA, 30 bp, Artificial Sequence
  Synthetic primer
acgttggatgctggaaaatggactctcagg

SEQ ID NO: 3218 - DNA, 30 bp, Artificial Sequence
  Synthetic primer
acgttggatgaagggcatgtgacaataacc

SEQ ID NO: 3219 - DNA, 30 bp, Artificial Sequence
  Synthetic primer
acgttggatgctgagagtccattttccagg

SEQ ID NO: 3220 - DNA, 30 bp, Artificial Sequence
  Synthetic primer
acgttggatgtttttcccctctgcccttcc

SEQ ID NO: 3221 - DNA, 30 bp, Artificial Sequence
  Synthetic primer
acgttggatgtctggaggcttgagaccatc

SEQ ID NO: 3222 - DNA, 30 bp, Artificial Sequence
  Synthetic primer
acgttggatgctaccccggcaaacttcttt

SEQ ID NO: 3223 - DNA, 30 bp, Artificial Sequence
  Synthetic primer
acgttggatgacccgtacattgtgcacatg

SEQ ID NO: 3224 - DNA, 30 bp, Artificial Sequence
  Synthetic primer
acgttggatgtctgaactcttccaggctac

SEQ ID NO: 3225 - DNA, 30 bp, Artificial Sequence
  Synthetic primer
acgttggatgggccatggtcttacatggag

SEQ ID NO: 3226 - DNA, 30 bp, Artificial Sequence
  Synthetic primer
acgttggatgaactccagacagcatttcag

SEQ ID NO: 3227 - DNA, 30 bp, Artificial Sequence
  Synthetic primer
acgttggatgagggaaaaaccatcagagag

SEQ ID NO: 3228 - DNA, 30 bp, Artificial Sequence
  Synthetic primer
acgttggatgaagagactatgctggtaggg

SEQ ID NO: 3229 - DNA, 30 bp, Artificial Sequence
  Synthetic primer
acgttggatgatttctgaggtggccctttg

SEQ ID NO: 3230 - DNA, 30 bp, Artificial Sequence
  Synthetic primer
acgttggatgatctggagcactcaaaactg

SEQ ID NO: 3231 - DNA, 30 bp, Artificial Sequence
  Synthetic primer
acgttggatgccagtcacattgcaacatag

SEQ ID NO: 3232 - DNA, 30 bp, Artificial Sequence
  Synthetic primer
acgttggatgaaagtgagtccctgtctcag

SEQ ID NO: 3233 - DNA, 30 bp, Artificial Sequence
  Synthetic primer
acgttggatgacaatgggagtaggaaaaga

SEQ ID NO: 3234 - DNA, 30 bp, Artificial Sequence; identical to SEQ ID NO: 3232
  Synthetic primer

SEQ ID NO: 3235 - DNA, 30 bp, Artificial Sequence; identical to SEQ ID NO: 3233
  Synthetic primer

SEQ ID NO: 3236 - DNA, 30 bp, Artificial Sequence
  Synthetic primer
acgttggatgtgaggtgggaggatcgctta

SEQ ID NO: 3237 - DNA, 30 bp, Artificial Sequence
  Synthetic primer
acgttggatgacagggactcactttattgc

SEQ ID NO: 3238 - DNA, 30 bp, Artificial Sequence
  Synthetic primer
acgttggatggaagagatgatgacttgccc

SEQ ID NO: 3239 - DNA, 30 bp, Artificial Sequence
  Synthetic primer
acgttggatgatgcagatgagctaccacac

SEQ ID NO: 3240 - DNA, 30 bp, Artificial Sequence
  Synthetic primer
acgttggatgtttgcagcttgcctagcatg

SEQ ID NO: 3241 - DNA, 30 bp, Artificial Sequence
  Synthetic primer
acgttggatgcttcatccttcagtttcccc

SEQ ID NO: 3242 - DNA, 30 bp, Artificial Sequence; identical to SEQ ID NO: 3240
  Synthetic primer

SEQ ID NO: 3243 - DNA, 30 bp, Artificial Sequence; identical to SEQ ID NO: 3241
  Synthetic primer

SEQ ID NO: 3244 - DNA, 30 bp, Artificial Sequence
  Synthetic primer
acgttggatggtctaggaaagggagaacag

SEQ ID NO: 3245 - DNA, 30 bp, Artificial Sequence
  Synthetic primer
acgttggatgaaaactccctcctaacaccc

SEQ ID NO: 3246 - DNA, 30 bp, Artificial Sequence
  Synthetic primer
acgttggatgtttgtagttggacaccccac

SEQ ID NO: 3247 - DNA, 30 bp, Artificial Sequence
  Synthetic primer
acgttggatgagcttgtttcagacctcagg

SEQ ID NO: 3248 - DNA, 30 bp, Artificial Sequence
  Synthetic primer
acgttggatgcatggagaggagattggatg

SEQ ID NO: 3249 - DNA, 30 bp, Artificial Sequence
  Synthetic primer
acgttggatgatctctggcctggaatactg

SEQ ID NO: 3250 - DNA, 30 bp, Artificial Sequence
  Synthetic primer
acgttggatgacatacccagagcatcaagg

SEQ ID NO: 3251 - DNA, 30 bp, Artificial Sequence
  Synthetic primer
acgttggatgcaaggtctgtcatctctgtg

SEQ ID NO: 3252 - DNA, 30 bp, Artificial Sequence
  Synthetic primer
acgttggatgagaatctccttctgttcctc

SEQ ID NO: 3253 - DNA, 30 bp, Artificial Sequence
  Synthetic primer
acgttggatgatgaagaaggtgagggtgag

SEQ ID NO: 3254 - DNA, 30 bp, Artificial Sequence
  Synthetic primer
acgttggatgagtgtacatccggggaaatg

SEQ ID NO: 3255 - DNA, 30 bp, Artificial Sequence
  Synthetic primer
acgttggatggaatctccttctgttcctcc

SEQ ID NO: 3256 - DNA, 30 bp, Artificial Sequence
  Synthetic primer
acgttggatggccatgaaaagacatgaagg

SEQ ID NO: 3257 - DNA, 30 bp, Artificial Sequence
  Synthetic primer
acgttggatgccaggatgtcatatacttgg

SEQ ID NO: 3258 - DNA, 30 bp, Artificial Sequence
  Synthetic primer
acgttggatggttcaaagtctgcatgacgg

SEQ ID NO: 3259 - DNA, 30 bp, Artificial Sequence
  Synthetic primer
acgttggatggtggacagatgccattacac

SEQ ID NO: 3260 - DNA, 30 bp, Artificial Sequence
  Synthetic primer
acgttggatgatggtgacaggaacactctg

SEQ ID NO: 3261 - DNA, 30 bp, Artificial Sequence
  Synthetic primer
acgttggatgagaagaaggtggatgccagg

SEQ ID NO: 3262 - DNA, 30 bp, Artificial Sequence
  Synthetic primer
acgttggatgttgtccgatgtcatggctgg

SEQ ID NO: 3263 - DNA, 30 bp, Artificial Sequence
  Synthetic primer
acgttggatgagctgagccagagcagaaag

SEQ ID NO: 3264 - DNA, 30 bp, Artificial Sequence
  Synthetic primer
acgttggatgtgaactagcttttcatggag

SEQ ID NO: 3265 - DNA, 30 bp, Artificial Sequence
  Synthetic primer
acgttggatgtatcccagctcttgtctgtc

SEQ ID NO: 3266 - DNA, 30 bp, Artificial Sequence
  Synthetic primer
acgttggatgggtgataaagtaagaccctg

SEQ ID NO: 3267 - DNA, 30 bp, Artificial Sequence
  Synthetic primer
acgttggatgtgacagagggttggtgtgtt

SEQ ID NO: 3268 - DNA, 30 bp, Artificial Sequence
  Synthetic primer
acgttggatgttgtttcttcccttggttcc

SEQ ID NO: 3269 - DNA, 30 bp, Artificial Sequence
  Synthetic primer
acgttggatgaagaacctggagatagcacc

SEQ ID NO: 3270 - DNA, 30 bp, Artificial Sequence
  Synthetic primer
acgttggatgtacctgcactttccacttcc

SEQ ID NO: 3271 - DNA, 30 bp, Artificial Sequence
  Synthetic primer
acgttggatgtttaatggatgcccgcttgc

SEQ ID NO: 3272 - DNA, 30 bp, Artificial Sequence
  Synthetic primer
acgttggatggtctctttggactgtaagcc

SEQ ID NO: 3273 - DNA, 30 bp, Artificial Sequence
  Synthetic primer
acgttggatgtagggacataggaggtgaac

SEQ ID NO: 3274 - DNA, 30 bp, Artificial Sequence
  Synthetic primer
acgttggatgtcagctgcattctcatcctg

SEQ ID NO: 3275 - DNA, 30 bp, Artificial Sequence
  Synthetic primer
acgttggatgttttgtagatgcgtcacccg

SEQ ID NO: 3276 - DNA, 30 bp, Artificial Sequence
  Synthetic primer
acgttggatgtggtccttccttgaaaagtc

SEQ ID NO: 3277 - DNA, 30 bp, Artificial Sequence
  Synthetic primer
acgttggatgtcctcagttaaagatctgcc

SEQ ID NO: 3278 - DNA, 30 bp, Artificial Sequence
  Synthetic primer
acgttggatgtctgaaggcagaacctatgg

SEQ ID NO: 3279 - DNA, 30 bp, Artificial Sequence
  Synthetic primer
acgttggatgggtcacagagacatgtagtg

SEQ ID NO: 3280 - DNA, 30 bp, Artificial Sequence
  Synthetic primer
acgttggatgccagactttgaagacaatgc

SEQ ID NO: 3281 - DNA, 30 bp, Artificial Sequence
  Synthetic primer
acgttggatgaaggaagaaagtcaggtgtc

SEQ ID NO: 3282 - DNA, 30 bp, Artificial Sequence
  Synthetic primer
acgttggatgcccttgcacaatgtatgtcc

SEQ ID NO: 3283 - DNA, 30 bp, Artificial Sequence
  Synthetic primer
acgttggatgatcctatatccagatgggcc

SEQ ID NO: 3284 - DNA, 30 bp, Artificial Sequence
  Synthetic primer
acgttggatgaattagaagtagaggcagag

SEQ ID NO: 3285 - DNA, 30 bp, Artificial Sequence
  Synthetic primer
acgttggatgggatataaacccatggatcg

SEQ ID NO: 3286 - DNA, 30 bp, Artificial Sequence
  Synthetic primer
acgttggatgaagccattgctctttgctgg

SEQ ID NO: 3287 - DNA, 30 bp, Artificial Sequence
  Synthetic primer
acgttggatgaacctccgagacaaacaagg

SEQ ID NO: 3288 - DNA, 30 bp, Artificial Sequence; identical to SEQ ID NO: 3286
  Synthetic primer

SEQ ID NO: 3289 - DNA, 30 bp, Artificial Sequence; identical to SEQ ID NO: 3287
  Synthetic primer

SEQ ID NO: 3290 - DNA, 30 bp, Artificial Sequence
  Synthetic primer
acgttggatggcatgatcttggctcactgc

SEQ ID NO: 3291 - DNA, 30 bp, Artificial Sequence
  Synthetic primer
acgttggatgtagtcccagtgactcgagag

SEQ ID NO: 3292 - DNA, 30 bp, Artificial Sequence
  Synthetic primer
acgttggatgcaaggagagggaaactgtag

SEQ ID NO: 3293 - DNA, 30 bp, Artificial Sequence
  Synthetic primer
acgttggatgtatgaagtgtctggcacagg

SEQ ID NO: 3294 - DNA, 30 bp, Artificial Sequence
  Synthetic primer
acgttggatgaagcagggtatcttccactg

SEQ ID NO: 3295 - DNA, 31 bp, Artificial Sequence
  Synthetic primer
acgttggatgtggccattgctcctggagctt

SEQ ID NO: 3296 - DNA, 30 bp, Artificial Sequence
  Synthetic primer
acgttggatgtgggtctctgcaacacagtt

SEQ ID NO: 3297 - DNA, 30 bp, Artificial Sequence
  Synthetic primer
acgttggatgatggcacacacttttccagc

SEQ ID NO: 3298 - DNA, 30 bp, Artificial Sequence
  Synthetic primer
acgttggatgattctacctccacactgcac

SEQ ID NO: 3299 - DNA, 30 bp, Artificial Sequence
  Synthetic primer
acgttggatggagctgtctgcagcaaattc

SEQ ID NO: 3300 - DNA, 30 bp, Artificial Sequence
  Synthetic primer
acgttggatgagagctgaagtcacacagac

SEQ ID NO: 3301 - DNA, 30 bp, Artificial Sequence
  Synthetic primer
acgttggatgtattacgtgctggaagggac

SEQ ID NO: 3302 - DNA, 30 bp, Artificial Sequence
  Synthetic primer
acgttggatgtgacctggtttcctgacaca

SEQ ID NO: 3303 - DNA, 30 bp, Artificial Sequence
  Synthetic primer
acgttggatgtttcagcaacgaagtccagg

SEQ ID NO: 3304 - DNA, 30 bp, Artificial Sequence
  Synthetic primer
acgttggatgaaaagacaggcatcctcagg

SEQ ID NO: 3305 - DNA, 30 bp, Artificial Sequence
  Synthetic primer
acgttggatgggctgagttatgttggaaag

SEQ ID NO: 3306 - DNA, 30 bp, Artificial Sequence
  Synthetic primer
acgttggatgtaggtcaaagagcatgtgtg

SEQ ID NO: 3307 - DNA, 30 bp, Artificial Sequence
  Synthetic primer
acgttggatgggagaggctcttttttacac

SEQ ID NO: 3308 - DNA, 30 bp, Artificial Sequence
  Synthetic primer
acgttggatgcctctttgggtaaacagacc

SEQ ID NO: 3309 - DNA, 30 bp, Artificial Sequence
  Synthetic primer
acgttggatgtgggaaatgacaagcatctg

SEQ ID NO: 3310 - DNA, 30 bp, Artificial Sequence
  Synthetic primer
acgttggatgccctaggttcttcctttccc

SEQ ID NO: 3311 - DNA, 30 bp, Artificial Sequence
  Synthetic primer
acgttggatgtgagttcacagcctgctttg

SEQ ID NO: 3312 - DNA, 30 bp, Artificial Sequence
  Synthetic primer
acgttggatgatgggctcctcagatacatg

SEQ ID NO: 3313 - DNA, 30 bp, Artificial Sequence
  Synthetic primer
acgttggatggcccattttagaggtgagag

SEQ ID NO: 3314 - DNA, 30 bp, Artificial Sequence
  Synthetic primer
acgttggatggagcccattttagaggtgag

SEQ ID NO: 3315 - DNA, 30 bp, Artificial Sequence
  Synthetic primer
acgttggatgtcctcagatacatgagcagc

SEQ ID NO: 3316 - DNA, 30 bp, Artificial Sequence
  Synthetic primer
acgttggatgaggaaggacagattagctgg

SEQ ID NO: 3317 - DNA, 30 bp, Artificial Sequence
  Synthetic primer
acgttggatgattaaccagagtgtcccatc

SEQ ID NO: 3318 - DNA, 30 bp, Artificial Sequence
  Synthetic primer
acgttggatgtatgttgcccagcctggttg

SEQ ID NO: 3319 - DNA, 30 bp, Artificial Sequence
  Synthetic primer
acgttggatgatcccagcattttgggaggc

SEQ ID NO: 3320 - DNA, 30 bp, Artificial Sequence
  Synthetic primer
acgttggatggccaaaccatatcacctagc

SEQ ID NO: 3321 - DNA, 30 bp, Artificial Sequence
  Synthetic primer
acgttggatgaaccaggctgggcaacatag

SEQ ID NO: 3322 - DNA, 30 bp, Artificial Sequence
  Synthetic primer
acgttggatgttctgttatgtgcagcctag

SEQ ID NO: 3323 - DNA, 30 bp, Artificial Sequence
  Synthetic primer
acgttggatgtctatgttggcccctttcag

SEQ ID NO: 3324 - DNA, 30 bp, Artificial Sequence
  Synthetic primer
acgttggatgttctgaaatctaggcagagg

SEQ ID NO: 3325 - DNA, 30 bp, Artificial Sequence
  Synthetic primer
acgttggatgctcaagccttgacaaattcc

SEQ ID NO: 3326 - DNA, 30 bp, Artificial Sequence
  Synthetic primer
acgttggatgttctgggatctggaagatgg

SEQ ID NO: 3327 - DNA, 30 bp, Artificial Sequence
  Synthetic primer
acgttggatgagtgtgaaagggaaatgtcg

SEQ ID NO: 3328 - DNA, 30 bp, Artificial Sequence
  Synthetic primer
acgttggatgtagtgagggctacatgtctc

SEQ ID NO: 3329 - DNA, 30 bp, Artificial Sequence
  Synthetic primer
acgttggatggacagagtgagaccctgttt

SEQ ID NO: 3330 - DNA, 30 bp, Artificial Sequence
  Synthetic primer
acgttggatgcagagaatctaggttgcctg

SEQ ID NO: 3331 - DNA, 30 bp, Artificial Sequence
  Synthetic primer
acgttggatggagaagaagcctggctaaag

SEQ ID NO: 3332 - DNA, 30 bp, Artificial Sequence
  Synthetic primer
acgttggatgaggtaatcagtggtagcagg

SEQ ID NO: 3333 - DNA, 30 bp, Artificial Sequence
  Synthetic primer
acgttggatggaggagggaaagtcagatag

SEQ ID NO: 3334 - DNA, 30 bp, Artificial Sequence
  Synthetic primer
acgttggatgaagcactccttccaccttgg

SEQ ID NO: 3335 - DNA, 30 bp, Artificial Sequence
  Synthetic primer
acgttggatgtagtgagaccctgtctctac

SEQ ID NO: 3336 - DNA, 30 bp, Artificial Sequence
  Synthetic primer
acgttggatgattgcagactgtcaagcctg

SEQ ID NO: 3337 - DNA, 30 bp, Artificial Sequence
  Synthetic primer
acgttggatgagagcagagtcagcctaagg

SEQ ID NO: 3338 - DNA, 30 bp, Artificial Sequence
  Synthetic primer
acgttggatgattgcacaactgcactccag

SEQ ID NO: 3339 - DNA, 30 bp, Artificial Sequence
  Synthetic primer
acgttggatgggaattggtggcgttatgtc

SEQ ID NO: 3340 - DNA, 30 bp, Artificial Sequence
  Synthetic primer
acgttggatgagccgcagttttggatcttc

SEQ ID NO: 3341 - DNA, 30 bp, Artificial Sequence
  Synthetic primer
acgttggatgccagctgtatacataccctg

SEQ ID NO: 3342 - DNA, 30 bp, Artificial Sequence
  Synthetic primer
acgttggatgaaagattaaaggctccaggc

SEQ ID NO: 3343 - DNA, 30 bp, Artificial Sequence
  Synthetic primer
acgttggatgttcagcttcctctccttgtg

SEQ ID NO: 3344 - DNA, 30 bp, Artificial Sequence
  Synthetic primer
acgttggatgaaaaataggcaggaggccag

SEQ ID NO: 3345 - DNA, 30 bp, Artificial Sequence
  Synthetic primer
acgttggatgtgacagtgatgctgttggtg

SEQ ID NO: 3346 - DNA, 30 bp, Artificial Sequence
  Synthetic primer
acgttggatgaccccccataataaaccagc

SEQ ID NO: 3347 - DNA, 30 bp, Artificial Sequence
  Synthetic primer
acgttggatggggcttctgacaagaacaag

SEQ ID NO: 3348 - DNA, 30 bp, Artificial Sequence
  Synthetic primer
acgttggatgggaggcagataactcaaagc

SEQ ID NO: 3349 - DNA, 30 bp, Artificial Sequence
  Synthetic primer
acgttggatgttccccacctccatctacca

SEQ ID NO: 3350 - DNA, 30 bp, Artificial Sequence
  Synthetic primer
acgttggatgtccagcctatatgacagagc

SEQ ID NO: 3351 - DNA, 30 bp, Artificial Sequence
  Synthetic primer
acgttggatgctctttccctctccctttct

SEQ ID NO: 3352 - DNA, 30 bp, Artificial Sequence; identical to SEQ ID NO: 3351
  Synthetic primer

SEQ ID NO: 3353 - DNA, 30 bp, Artificial Sequence
  Synthetic primer
acgttggatgtgacagagcaagattctgtg

SEQ ID NO: 3354 - DNA, 30 bp, Artificial Sequence; identical to SEQ ID NO: 3351
  Synthetic primer

SEQ ID NO: 3355 - DNA, 30 bp, Artificial Sequence; identical to SEQ ID NO: 3353
  Synthetic primer

SEQ ID NO: 3356 - DNA, 30 bp, Artificial Sequence; identical to SEQ ID NO: 3353
  Synthetic primer

SEQ ID NO: 3357 - DNA, 30 bp, Artificial Sequence; identical to SEQ ID NO: 3351
  Synthetic primer

SEQ ID NO: 3358 - DNA, 30 bp, Artificial Sequence; identical to SEQ ID NO: 3353
  Synthetic primer

SEQ ID NO: 3359 - DNA, 30 bp, Artificial Sequence; identical to SEQ ID NO: 3351
  Synthetic primer

SEQ ID NO: 3360 - DNA, 30 bp, Artificial Sequence; identical to SEQ ID NO: 3351
  Synthetic primer

SEQ ID NO: 3361 - DNA, 30 bp, Artificial Sequence; identical to SEQ ID NO: 3353
  Synthetic primer

SEQ ID NO: 3362 - DNA, 30 bp, Artificial Sequence; identical to SEQ ID NO: 3351
  Synthetic primer

SEQ ID NO: 3363 - DNA, 30 bp, Artificial Sequence; identical to SEQ ID NO: 3353
  Synthetic primer

SEQ ID NO: 3364 - DNA, 30 bp, Artificial Sequence; identical to SEQ ID NO: 3351
  Synthetic primer

SEQ ID NO: 3365 - DNA, 30 bp, Artificial Sequence; identical to SEQ ID NO: 3353
  Synthetic primer

SEQ ID NO: 3366 - DNA, 30 bp, Artificial Sequence
  Synthetic primer
acgttggatgggcacccaacccaaaattac

SEQ ID NO: 3367 - DNA, 30 bp, Artificial Sequence
  Synthetic primer
acgttggatgcagtttcagttctgggttgg

SEQ ID NO: 3368 - DNA, 30 bp, Artificial Sequence
  Synthetic primer
acgttggatgcagcatcagaaatggtctag

SEQ ID NO: 3369 - DNA, 31 bp, Artificial Sequence
  Synthetic primer
acgttggatgccaaattgttgggattacagg

SEQ ID NO: 3370 - DNA, 30 bp, Artificial Sequence
  Synthetic primer
acgttggatgccatctgcaagaaaataaac

SEQ ID NO: 3371 - DNA, 31 bp, Artificial Sequence
  Synthetic primer
acgttggatgggtttcacatttaggtctatg

SEQ ID NO: 3372 - DNA, 30 bp, Artificial Sequence
  Synthetic primer
acgttggatggctgtttcagatacatgtcc

SEQ ID NO: 3373 - DNA, 30 bp, Artificial Sequence
  Synthetic primer
acgttggatggcgacattccgcctcaaaaa

SEQ ID NO: 3374 - DNA, 30 bp, Artificial Sequence
  Synthetic primer
acgttggatgtgtgagatatcgtcagattc

SEQ ID NO: 3375 - DNA, 30 bp, Artificial Sequence
  Synthetic primer
acgttggatgtcagaagcacagctgacaac

SEQ ID NO: 3376 - DNA, 30 bp, Artificial Sequence
  Synthetic primer
acgttggatgggtctcctttcaagctatgc

SEQ ID NO: 3377 - DNA, 30 bp, Artificial Sequence
  Synthetic primer
acgttggatgggatgtcaacagaagccaag

SEQ ID NO: 3378 - DNA, 30 bp, Artificial Sequence
  Synthetic primer
acgttggatggctttgactgaatcttggac

SEQ ID NO: 3379 - DNA, 30 bp, Artificial Sequence
  Synthetic primer
acgttggatgatagcttgaaaggagacctg

SEQ ID NO: 3380 - DNA, 30 bp, Artificial Sequence
  Synthetic primer
acgttggatgtcagcttcttcaacctgtgg

SEQ ID NO: 3381 - DNA, 30 bp, Artificial Sequence
  Synthetic primer
acgttggatgagagggttgaactgaagaag

SEQ ID NO: 3382 - DNA, 30 bp, Artificial Sequence
  Synthetic primer
acgttggatgagctgatttcagtcctggag

SEQ ID NO: 3383 - DNA, 30 bp, Artificial Sequence
  Synthetic primer
acgttggatgcttcttgccatcctaatatt

SEQ ID NO: 3384 - DNA, 30 bp, Artificial Sequence
  Synthetic primer
acgttggatgaccccagtagtttctgatgg

SEQ ID NO: 3385 - DNA, 30 bp, Artificial Sequence
  Synthetic primer
acgttggatgaatagctgatttcagtcctg

SEQ ID NO: 3386 - DNA, 30 bp, Artificial Sequence; identical to SEQ ID NO: 309
  Synthetic primer

SEQ ID NO: 3387 - DNA, 30 bp, Artificial Sequence
  Synthetic primer
acgttggatgtggtgaaaccccatctctgc

SEQ ID NO: 3388 - DNA, 30 bp, Artificial Sequence
  Synthetic primer
acgttggatgtggagtgcagtggcatgatc

SEQ ID NO: 3389 - DNA, 30 bp, Artificial Sequence
  Synthetic primer
acgttggatgtgaggcaggagaatcgcttg

SEQ ID NO: 3390 - DNA, 30 bp, Artificial Sequence
  Synthetic primer
acgttggatgatcctgaatggccagagatg

SEQ ID NO: 3391 - DNA, 30 bp, Artificial Sequence
  Synthetic primer
acgttggatgataccaccaggaactcacag

SEQ ID NO: 3392 - DNA, 30 bp, Artificial Sequence
  Synthetic primer
acgttggatgctaccactcaggagttgttc

SEQ ID NO: 3393 - DNA, 30 bp, Artificial Sequence
  Synthetic primer
acgttggatgatttggttgcgttcccatgg

SEQ ID NO: 3394 - DNA, 30 bp, Artificial Sequence
  Synthetic primer
acgttggatgttatttgagctctgatagtg

SEQ ID NO: 3395 - DNA, 30 bp, Artificial Sequence
  Synthetic primer
acgttggatgccacaaaagcacgtgatttc

SEQ ID NO: 3396 - DNA, 30 bp, Artificial Sequence
  Synthetic primer
acgttggatgatttttctggctctgcctgg

SEQ ID NO: 3397 - DNA, 30 bp, Artificial Sequence
  Synthetic primer
acgttggatgtgttgaagcagggctacatg

SEQ ID NO: 3398 - DNA, 30 bp, Artificial Sequence
  Synthetic primer
acgttggatgacaaaaactagctgggtgtg

SEQ ID NO: 3399 - DNA, 30 bp, Artificial Sequence
  Synthetic primer
acgttggatgccgggttcaagtgattctca

SEQ ID NO: 3400 - DNA, 30 bp, Artificial Sequence
  Synthetic primer
acgttggatgaccccagtaagaggcttgaa

SEQ ID NO: 3401 - DNA, 31 bp, Artificial Sequence
  Synthetic primer
acgttggatggcacaggttaataaatgcctc

SEQ ID NO: 3402 - DNA, 30 bp, Artificial Sequence
  Synthetic primer
acgttggatgcctacttcttcttcccacac

SEQ ID NO: 3403 - DNA, 30 bp, Artificial Sequence
  Synthetic primer
acgttggatggccaggtaaattcaagcctc

SEQ ID NO: 3404 - DNA, 31 bp, Artificial Sequence
  Synthetic primer
acgttggatggactggcttatttgacttagc

SEQ ID NO: 3405 - DNA, 31 bp, Artificial Sequence
  Synthetic primer
acgttggatgggaaggaaattctgacatatg

SEQ ID NO: 3406 - DNA, 30 bp, Artificial Sequence
  Synthetic primer
acgttggatgacatgacattcaacagcccc

SEQ ID NO: 3407 - DNA, 30 bp, Artificial Sequence
  Synthetic primer
acgttggatgttccgaatctctgccaacac

SEQ ID NO: 3408 - DNA, 30 bp, Artificial Sequence
  Synthetic primer
acgttggatgttaaacagaccaggtgttgg

SEQ ID NO: 3409 - DNA, 30 bp, Artificial Sequence
  Synthetic primer
acgttggatgatcagggaggatgaaatctc

SEQ ID NO: 3410 - DNA, 30 bp, Artificial Sequence
  Synthetic primer
acgttggatgggcttctcaattcagatggg

SEQ ID NO: 3411 - DNA, 30 bp, Artificial Sequence
  Synthetic primer
acgttggatggtgctggctgcctagttcta

SEQ ID NO: 3412 - DNA, 30 bp, Artificial Sequence
  Synthetic primer
acgttggatggggttgctggaaatctcatg

SEQ ID NO: 3413 - DNA, 30 bp, Artificial Sequence
  Synthetic primer
acgttggatgggtacttctgtgatcccatc

SEQ ID NO: 3414 - DNA, 30 bp, Artificial Sequence
  Synthetic primer
acgttggatgtaagcagagctgaagagaag

SEQ ID NO: 3415 - DNA, 30 bp, Artificial Sequence
  Synthetic primer
acgttggatggagacagcaggaaaacttgg

SEQ ID NO: 3416 - DNA, 30 bp, Artificial Sequence
  Synthetic primer
acgttggatgaagttttcctgctgtctcac

SEQ ID NO: 3417 - DNA, 30 bp, Artificial Sequence
  Synthetic primer
acgttggatggcaggaagttagcatattgg

SEQ ID NO: 3418 - DNA, 30 bp, Artificial Sequence
  Synthetic primer
acgttggatgatcatggcagaaggcaaagg

SEQ ID NO: 3419 - DNA, 30 bp, Artificial Sequence
  Synthetic primer
acgttggatgaaaagtgtatggtgcctccc

SEQ ID NO: 3420 - DNA, 30 bp, Artificial Sequence
  Synthetic primer
acgttggatgagaatggcctaatccaggag

SEQ ID NO: 3421 - DNA, 30 bp, Artificial Sequence
  Synthetic primer
acgttggatgtgtctctgccttatatgggc

SEQ ID NO: 3422 - DNA, 30 bp, Artificial Sequence
  Synthetic primer
acgttggatgccctcatggagtttatagtc

SEQ ID NO: 3423 - DNA, 30 bp, Artificial Sequence
  Synthetic primer
acgttggatgcccctttccttccacatttt

SEQ ID NO: 3424 - DNA, 30 bp, Artificial Sequence
  Synthetic primer
acgttggatgagcaagtactgcactttggg

SEQ ID NO: 3425 - DNA, 30 bp, Artificial Sequence
  Synthetic primer
acgttggatgtaagctagaacctctggcac

SEQ ID NO: 3426 - DNA, 30 bp, Artificial Sequence
  Synthetic primer
acgttggatgatgcctgccacattgggtaa

SEQ ID NO: 3427 - DNA, 30 bp, Artificial Sequence
  Synthetic primer
acgttggatgggtagggctgtctgtttcat

SEQ ID NO: 3428 - DNA, 30 bp, Artificial Sequence
  Synthetic primer
acgttggatgtgcagggtagcatgaatttg

SEQ ID NO: 3429 - DNA, 30 bp, Artificial Sequence
  Synthetic primer
acgttggatgtatcctccaagttcaaatcc

SEQ ID NO: 3430 - DNA, 30 bp, Artificial Sequence
  Synthetic primer
acgttggatgataggtctgatgtcagcagc

SEQ ID NO: 3431 - DNA, 30 bp, Artificial Sequence
  Synthetic primer
acgttggatggtgccacagaactgacattc

SEQ ID NO: 3432 - DNA, 30 bp, Artificial Sequence
  Synthetic primer
acgttggatgcaatgctgctgacatcagac

SEQ ID NO: 3433 - DNA, 30 bp, Artificial Sequence
  Synthetic primer
acgttggatgcaagaagggcatttctaccc

SEQ ID NO: 3434 - DNA, 30 bp, Artificial Sequence
  Synthetic primer
acgttggatgtgtgatccagacatcagctc

SEQ ID NO: 3435 - DNA, 30 bp, Artificial Sequence
  Synthetic primer
acgttggatgcccttgttttagaggttggg

SEQ ID NO: 3436 - DNA, 30 bp, Artificial Sequence
  Synthetic primer
acgttggatgcccacagaaacaaaaccagc

SEQ ID NO: 3437 - DNA, 30 bp, Artificial Sequence
  Synthetic primer
acgttggatgagccaccatgtttgaatggc

SEQ ID NO: 3438 - DNA, 30 bp, Artificial Sequence
  Synthetic primer
acgttggatgcggacataactttcccaagg

SEQ ID NO: 3439 - DNA, 30 bp, Artificial Sequence
  Synthetic primer
acgttggatggtggctctgaccttcaaaac

SEQ ID NO: 3440 - DNA, 30 bp, Artificial Sequence
  Synthetic primer
acgttggatgcacatctcgaggttgaagtc

SEQ ID NO: 3441 - DNA, 30 bp, Artificial Sequence
  Synthetic primer
acgttggatgactggaaggaatcacactgc

SEQ ID NO: 3442 - DNA, 30 bp, Artificial Sequence
  Synthetic primer
acgttggatgccctagataaagcaggcttc

SEQ ID NO: 3443 - DNA, 30 bp, Artificial Sequence
  Synthetic primer
acgttggatgtaaatctctcctctggaggc

SEQ ID NO: 3444 - DNA, 30 bp, Artificial Sequence
  Synthetic primer
acgttggatgattgcagtggtgcagtggag

SEQ ID NO: 3445 - DNA, 30 bp, Artificial Sequence
  Synthetic primer
acgttggatgtagtcccagctactctggag

SEQ ID NO: 3446 - DNA, 30 bp, Artificial Sequence
  Synthetic primer
acgttggatgaagacagaggttgcagtgag

SEQ ID NO: 3447 - DNA, 30 bp, Artificial Sequence
  Synthetic primer
acgttggatgtgccatggcctgatttccac

SEQ ID NO: 3448 - DNA, 30 bp, Artificial Sequence
  Synthetic primer
acgttggatggaagacattggaggtgttag

SEQ ID NO: 3449 - DNA, 30 bp, Artificial Sequence
  Synthetic primer
acgttggatgagcgagactccatctcaaag

SEQ ID NO: 3450 - DNA, 30 bp, Artificial Sequence
  Synthetic primer
acgttggatgctaagggtatctcacctcag

SEQ ID NO: 3451 - DNA, 30 bp, Artificial Sequence
  Synthetic primer
acgttggatgcaagaagatctgggagaagc

SEQ ID NO: 3452 - DNA, 30 bp, Artificial Sequence
  Synthetic primer
acgttggatgtggcacataggaaatgctcg

SEQ ID NO: 3453 - DNA, 30 bp, Artificial Sequence
  Synthetic primer
acgttggatgttcaagctgtcagttgcagg

SEQ ID NO: 3454 - DNA, 30 bp, Artificial Sequence
  Synthetic primer
acgttggatgtagaaggctggaagtcagtg

SEQ ID NO: 3455 - DNA, 30 bp, Artificial Sequence
  Synthetic primer
acgttggatgtgttgtgttgggcagaaagg

SEQ ID NO: 3456 - DNA, 30 bp, Artificial Sequence
  Synthetic primer
acgttggatgtcaggaccacaaatcccatg

SEQ ID NO: 3457 - DNA, 30 bp, Artificial Sequence
  Synthetic primer
acgttggatgatgggaactgaaggtcatcc

SEQ ID NO: 3458 - DNA, 30 bp, Artificial Sequence
  Synthetic primer
acgttggatgttatggcttcctctccctac

SEQ ID NO: 3459 - DNA, 30 bp, Artificial Sequence
  Synthetic primer
acgttggatgcgtgtgcatatcctgatcac

SEQ ID NO: 3460 - DNA, 30 bp, Artificial Sequence
  Synthetic primer
acgttggatgcaaagttctctgcctgagtg

SEQ ID NO: 3461 - DNA, 30 bp, Artificial Sequence
  Synthetic primer
acgttggatggctccagtctctaatcacac

SEQ ID NO: 3462 - DNA, 30 bp, Artificial Sequence
  Synthetic primer
acgttggatgaactgcctggccatgctaag

SEQ ID NO: 3463 - DNA, 30 bp, Artificial Sequence
  Synthetic primer
acgttggatgttaccaagtgcatgcccgtc

SEQ ID NO: 3464 - DNA, 30 bp, Artificial Sequence
  Synthetic primer
acgttggatgacccctttgttggcctttac

SEQ ID NO: 3465 - DNA, 30 bp, Artificial Sequence
  Synthetic primer
acgttggatgctttctttgcctctccagtc

SEQ ID NO: 3466 - DNA, 30 bp, Artificial Sequence
  Synthetic primer
acgttggatgaagggccaagcaatgctttg

SEQ ID NO: 3467 - DNA, 30 bp, Artificial Sequence
  Synthetic primer
acgttggatgatcctaaccaggtctgatgg

SEQ ID NO: 3468 - DNA, 30 bp, Artificial Sequence
  Synthetic primer
acgttggatgcttcacatccctcctcaaag

SEQ ID NO: 3469 - DNA, 30 bp, Artificial Sequence
  Synthetic primer
acgttggatgtagccacgccattattggag

SEQ ID NO: 3470 - DNA, 30 bp, Artificial Sequence
  Synthetic primer
acgttggatgcagcaacccaaagcaacacg

SEQ ID NO: 3471 - DNA, 31 bp, Artificial Sequence
  Synthetic primer
acgttggatgtccagtgaggcctccctccaa

SEQ ID NO: 3472 - DNA, 30 bp, Artificial Sequence
  Synthetic primer
acgttggatgatcaggactacctgagcaac

SEQ ID NO: 3473 - DNA, 30 bp, Artificial Sequence
  Synthetic primer
acgttggatgtcctgtttctaagcagggag

SEQ ID NO: 3474 - DNA, 30 bp, Artificial Sequence
  Synthetic primer
acgttggatgggtggtcttgtttcagagtc

SEQ ID NO: 3475 - DNA, 30 bp, Artificial Sequence
  Synthetic primer
acgttggatgcgaatcagtcagcaaacctc

SEQ ID NO: 3476 - DNA, 30 bp, Artificial Sequence
  Synthetic primer
acgttggatgagaatctggagggaccaatg

SEQ ID NO: 3477 - DNA, 30 bp, Artificial Sequence
  Synthetic primer
acgttggatgaatgtccccagccttacttc

SEQ ID NO: 3478 - DNA, 30 bp, Artificial Sequence; identical to SEQ ID NO: 3477
  Synthetic primer

SEQ ID NO: 3479 - DNA, 30 bp, Artificial Sequence; identical to SEQ ID NO: 3476
  Synthetic primer

SEQ ID NO: 3480 - DNA, 30 bp, Artificial Sequence
  Synthetic primer
acgttggatgtgagtgctacatggcctctg

SEQ ID NO: 3481 - DNA, 30 bp, Artificial Sequence
  Synthetic primer
acgttggatgttggagacagagaacaaacc

SEQ ID NO: 3482 - DNA, 30 bp, Artificial Sequence
  Synthetic primer
acgttggatgttctttgctgccagggtttg

SEQ ID NO: 3483 - DNA, 30 bp, Artificial Sequence
  Synthetic primer
acgttggatggcaaaccttcaagccagcaa

SEQ ID NO: 3484 - DNA, 30 bp, Artificial Sequence
  Synthetic primer
acgttggatgtcctggtgcctcaaacaaag

SEQ ID NO: 3485 - DNA, 30 bp, Artificial Sequence
  Synthetic primer
acgttggatgacctgccacatagtagttgc

SEQ ID NO: 3486 - DNA, 30 bp, Artificial Sequence
  Synthetic primer
acgttggatgccagttcatccacttagtag

SEQ ID NO: 3487 - DNA, 30 bp, Artificial Sequence
  Synthetic primer
acgttggatgctgggttgccatttgcatac

SEQ ID NO: 3488 - DNA, 30 bp, Artificial Sequence
  Synthetic primer
acgttggatgtctgtcaatgtctctctctc

SEQ ID NO: 3489 - DNA, 30 bp, Artificial Sequence
  Synthetic primer
acgttggatgaacatccatcctgaatcacc

SEQ ID NO: 3490 - DNA, 30 bp, Artificial Sequence
  Synthetic primer
acgttggatgtattaggctcccacatctgg

SEQ ID NO: 3491 - DNA, 30 bp, Artificial Sequence
  Synthetic primer
acgttggatgcccttgcatagatgatgctg

SEQ ID NO: 3492 - DNA, 30 bp, Artificial Sequence
  Synthetic primer
acgttggatgtttttctggcactggtggtg

SEQ ID NO: 3493 - DNA, 30 bp, Artificial Sequence
  Synthetic primer
acgttggatgacctcactatgggtgatcag

SEQ ID NO: 3494 - DNA, 30 bp, Artificial Sequence
  Synthetic primer
acgttggatgtgtgtcacttctacctccac

SEQ ID NO: 3495 - DNA, 30 bp, Artificial Sequence
  Synthetic primer
acgttggatgccagtgtaatcacaagggtc

SEQ ID NO: 3496 - DNA, 30 bp, Artificial Sequence
  Synthetic primer
acgttggatgactggactcacccacataag

SEQ ID NO: 3497 - DNA, 30 bp, Artificial Sequence
  Synthetic primer
acgttggatgggtatgagggattttgcagg

SEQ ID NO: 3498 - DNA, 30 bp, Artificial Sequence
  Synthetic primer
acgttggatgatagaagcgtgaccttaccc

SEQ ID NO: 3499 - DNA, 30 bp, Artificial Sequence
  Synthetic primer
acgttggatgcctgcaaaatccctcatacc

SEQ ID NO: 3500 - DNA, 30 bp, Artificial Sequence
  Synthetic primer
acgttggatgatgtacaaactgaggctagg

SEQ ID NO: 3501 - DNA, 30 bp, Artificial Sequence
  Synthetic primer
acgttggatgcttcacctgagagatttcag

SEQ ID NO: 3502 - DNA, 30 bp, Artificial Sequence
  Synthetic primer
acgttggatgttagccaggcatagtggcat

SEQ ID NO: 3503 - DNA, 30 bp, Artificial Sequence
  Synthetic primer
acgttggatgttattgtaacctccgcctcc

SEQ ID NO: 3504 - DNA, 30 bp, Artificial Sequence
  Synthetic primer
acgttggatgagcttgcatttaccactcac

SEQ ID NO: 3505 - DNA, 30 bp, Artificial Sequence
  Synthetic primer
acgttggatgtagaaagtagacctcttggg

SEQ ID NO: 3506 - DNA, 30 bp, Artificial Sequence
  Synthetic primer
acgttggatgggcttggcatttcttgtcac

SEQ ID NO: 3507 - DNA, 30 bp, Artificial Sequence
  Synthetic primer
acgttggatgtagagaaaaggaggaaggag

SEQ ID NO: 3508 - DNA, 30 bp, Artificial Sequence; identical to SEQ ID NO: 3506
  Synthetic primer

SEQ ID NO: 3509 - DNA, 30 bp, Artificial Sequence; identical to SEQ ID NO: 3507
  Synthetic primer

SEQ ID NO: 3510 - DNA, 30 bp, Artificial Sequence
  Synthetic primer
acgttggatgagcaaccagtctagttttcg

SEQ ID NO: 3511 - DNA, 30 bp, Artificial Sequence
  Synthetic primer
acgttggatgcctagccaacatccttttcc

SEQ ID NO: 3512 - DNA, 30 bp, Artificial Sequence; identical to SEQ ID NO: 3511
  Synthetic primer

SEQ ID NO: 3513 - DNA, 30 bp, Artificial Sequence
  Synthetic primer
acgttggatgggatctctaagcaaccagtc

SEQ ID NO: 3514 - DNA, 30 bp, Artificial Sequence
  Synthetic primer
acgttggatgtattctgtatcccagtagcc

SEQ ID NO: 3515 - DNA, 30 bp, Artificial Sequence
  Synthetic primer
acgttggatgccatttcctatcttggtttc

SEQ ID NO: 3516 - DNA, 30 bp, Artificial Sequence
  Synthetic primer
acgttggatgctcagtgccagaaataccag

SEQ ID NO: 3517 - DNA, 30 bp, Artificial Sequence
  Synthetic primer
acgttggatggaaaccaagataggaaatgg

SEQ ID NO: 3518 - DNA, 30 bp, Artificial Sequence
  Synthetic primer
acgttggatgccttgtgaacttccaacctg

SEQ ID NO: 3519 - DNA, 30 bp, Artificial Sequence
  Synthetic primer
acgttggatgaggtctggcactgctaaatg

SEQ ID NO: 3520 - DNA, 30 bp, Artificial Sequence
  Synthetic primer
acgttggatgtcatcttggcaactccttcc

SEQ ID NO: 3521 - DNA, 30 bp, Artificial Sequence
  Synthetic primer
acgttggatgagtaagccctgatatgcctg

SEQ ID NO: 3522 - DNA, 30 bp, Artificial Sequence
  Synthetic primer
acgttggatgctcttagtatggaaaggcag

SEQ ID NO: 3523 - DNA, 30 bp, Artificial Sequence
  Synthetic primer
acgttggatgttggcatcctttgtaaacag

SEQ ID NO: 3524 - DNA, 30 bp, Artificial Sequence
  Synthetic primer
acgttggatgtaaggatggttcactgtggc

SEQ ID NO: 3525 - DNA, 30 bp, Artificial Sequence
  Synthetic primer
acgttggatgagctgccatctgtagcattc

SEQ ID NO: 3526 - DNA, 30 bp, Artificial Sequence
  Synthetic primer
acgttggatgtaccatcccttattagatgg

SEQ ID NO: 3527 - DNA, 30 bp, Artificial Sequence
  Synthetic primer
acgttggatgacatccatctgtgcatccat

SEQ ID NO: 3528 - DNA, 30 bp, Artificial Sequence
  Synthetic primer
acgttggatgtcctatattgtcagatggcc

SEQ ID NO: 3529 - DNA, 30 bp, Artificial Sequence
  Synthetic primer
acgttggatgcctacacacaaataggcatg

SEQ ID NO: 3530 - DNA, 30 bp, Artificial Sequence
  Synthetic primer
acgttggatggtatggttttgggtgtctgg

SEQ ID NO: 3531 - DNA, 30 bp, Artificial Sequence
  Synthetic primer
acgttggatgtaaccactgtggcttgagag

SEQ ID NO: 3532 - DNA, 30 bp, Artificial Sequence
  Synthetic primer
acgttggatgtcttctgtttctgtggctgc

SEQ ID NO: 3533 - DNA, 30 bp, Artificial Sequence
  Synthetic primer
acgttggatgaaaagctggccctaaaaggc

SEQ ID NO: 3534 - DNA, 30 bp, Artificial Sequence
  Synthetic primer
acgttggatgatgtccagacaccaaaaccc

SEQ ID NO: 3535 - DNA, 30 bp, Artificial Sequence
  Synthetic primer
acgttggatgatctacttggatctgggcag

SEQ ID NO: 3536 - DNA, 30 bp, Artificial Sequence
  Synthetic primer
acgttggatgaaccacactgtgcactcttc

SEQ ID NO: 3537 - DNA, 30 bp, Artificial Sequence
  Synthetic primer
acgttggatggggcatgaacgatatgcagt

SEQ ID NO: 3538 - DNA, 30 bp, Artificial Sequence
  Synthetic primer
acgttggatgcgacagatcaggaaaatagc

SEQ ID NO: 3539 - DNA, 30 bp, Artificial Sequence
  Synthetic primer
acgttggatggtgttcaggacagcatatcc

SEQ ID NO: 3540 - DNA, 30 bp, Artificial Sequence
  Synthetic primer
acgttggatgtgttctcaccctgttctgtt

SEQ ID NO: 3541 - DNA, 30 bp, Artificial Sequence
  Synthetic primer
acgttggatggggttctctcttgacagatg

SEQ ID NO: 3542 - DNA, 30 bp, Artificial Sequence
  Synthetic primer
acgttggatgttgtccatgtgacctctatg

SEQ ID NO: 3543 - DNA, 30 bp, Artificial Sequence
  Synthetic primer
acgttggatggggccatgaaaacctagttc

SEQ ID NO: 3544 - DNA, 30 bp, Artificial Sequence
  Synthetic primer
acgttggatgcatagagccctcaaaggtag

SEQ ID NO: 3545 - DNA, 30 bp, Artificial Sequence
  Synthetic primer
acgttggatgaggagtagtgagaaggaatc

SEQ ID NO: 3546 - DNA, 30 bp, Artificial Sequence
  Synthetic primer
acgttggatggggctgcaccttgtatttag

SEQ ID NO: 3547 - DNA, 30 bp, Artificial Sequence
  Synthetic primer
acgttggatgtactgtgtaaaacgagggag

SEQ ID NO: 3548 - DNA, 30 bp, Artificial Sequence; identical to SEQ ID NO: 3546
  Synthetic primer

SEQ ID NO: 3549 - DNA, 30 bp, Artificial Sequence; identical to SEQ ID NO: 3547
  Synthetic primer

SEQ ID NO: 3550 - DNA, 30 bp, Artificial Sequence; identical to SEQ ID NO: 3547
  Synthetic primer

SEQ ID NO: 3551 - DNA, 30 bp, Artificial Sequence; identical to SEQ ID NO: 3546
  Synthetic primer

SEQ ID NO: 3552 - DNA, 30 bp, Artificial Sequence
  Synthetic primer
acgttggatgcctgcagcttctaaaactgc

SEQ ID NO: 3553 - DNA, 30 bp, Artificial Sequence
  Synthetic primer
acgttggatgtcccaaagtgctgggattac

SEQ ID NO: 3554 - DNA, 30 bp, Artificial Sequence
  Synthetic primer
acgttggatgtgatctcagatcaccgcaac

SEQ ID NO: 3555 - DNA, 30 bp, Artificial Sequence
  Synthetic primer
acgttggatgtgtaatcccagctactcagg

SEQ ID NO: 3556 - DNA, 30 bp, Artificial Sequence
  Synthetic primer
acgttggatgatctgagatcacgccattgc

SEQ ID NO: 3557 - DNA, 30 bp, Artificial Sequence
  Synthetic primer
acgttggatgggtttgggcttccatgcagt

SEQ ID NO: 3558 - DNA, 30 bp, Artificial Sequence
  Synthetic primer
acgttggatgcccatcctacttttcacacc

SEQ ID NO: 3559 - DNA, 30 bp, Artificial Sequence
  Synthetic primer
acgttggatgagttgagattgtgccactgc

SEQ ID NO: 3560 - DNA, 30 bp, Artificial Sequence; identical to SEQ ID NO: 3558
  Synthetic primer

SEQ ID NO: 3561 - DNA, 30 bp, Artificial Sequence
  Synthetic primer
acgttggatgtgcagtgagttgagattgtg

SEQ ID NO: 3562 - DNA, 30 bp, Artificial Sequence
  Synthetic primer
acgttggatgtaggatgggtgtttcctagc

SEQ ID NO: 3563 - DNA, 30 bp, Artificial Sequence
  Synthetic primer
acgttggatgaacccatgggaccacaattc

SEQ ID NO: 3564 - DNA, 30 bp, Artificial Sequence
  Synthetic primer
acgttggatgatgaaggaagaagccctgac

SEQ ID NO: 3565 - DNA, 30 bp, Artificial Sequence
  Synthetic primer
acgttggatgtctgagggctctctctaatg

SEQ ID NO: 3566 - DNA, 30 bp, Artificial Sequence
  Synthetic primer
acgttggatgtgaagggaaaggaggccaag

SEQ ID NO: 3567 - DNA, 30 bp, Artificial Sequence
  Synthetic primer
acgttggatgtcttctgggatccagtcagg

SEQ ID NO: 3568 - DNA, 30 bp, Artificial Sequence
  Synthetic primer
acgttggatgtacatgatcctcccctctac

SEQ ID NO: 3569 - DNA, 30 bp, Artificial Sequence
  Synthetic primer
acgttggatgcactggatttggcaagaagg

SEQ ID NO: 3570 - DNA, 30 bp, Artificial Sequence
  Synthetic primer
acgttggatgtcagctcttagccatccttc

SEQ ID NO: 3571 - DNA, 30 bp, Artificial Sequence
  Synthetic primer
acgttggatggccactggatttggcaagaa

SEQ ID NO: 3572 - DNA, 30 bp, Artificial Sequence
  Synthetic primer
acgttggatgacctccacactcattacctc

SEQ ID NO: 3573 - DNA, 30 bp, Artificial Sequence
  Synthetic primer
acgttggatggcaagaataggttctttcgc

SEQ ID NO: 3574 - DNA, 30 bp, Artificial Sequence
  Synthetic primer
acgttggatgttgtcggtctcttctaagtg

SEQ ID NO: 3575 - DNA, 30 bp, Artificial Sequence
  Synthetic primer
acgttggatggcaccgagtaatatggagtc

SEQ ID NO: 3576 - DNA, 30 bp, Artificial Sequence
  Synthetic primer
acgttggatgaaggtgagagaaaactcacc

SEQ ID NO: 3577 - DNA, 30 bp, Artificial Sequence
  Synthetic primer
acgttggatgcaggagagtctgcccatttg

SEQ ID NO: 3578 - DNA, 30 bp, Artificial Sequence
  Synthetic primer
acgttggatgatgtcttacttatgcccttg

SEQ ID NO: 3579 - DNA, 30 bp, Artificial Sequence
  Synthetic primer
acgttggatgtcctaagaaataggtgcttc

SEQ ID NO: 3580 - DNA, 30 bp, Artificial Sequence
  Synthetic primer
acgttggatgacaaaccactaaactttcag

SEQ ID NO: 3581 - DNA, 30 bp, Artificial Sequence
  Synthetic primer
acgttggatggatttgttctggcaggaatg

SEQ ID NO: 3582 - DNA, 30 bp, Artificial Sequence
  Synthetic primer
acgttggatgaaatggagtaagggtcaggg

SEQ ID NO: 3583 - DNA, 30 bp, Artificial Sequence
  Synthetic primer
acgttggatggggagctggtggtgaaaaat

SEQ ID NO: 3584 - DNA, 30 bp, Artificial Sequence
  Synthetic primer
acgttggatgtccaggccaacattttcagg

SEQ ID NO: 3585 - DNA, 30 bp, Artificial Sequence
  Synthetic primer
acgttggatgtttgtgctactggagggaag

SEQ ID NO: 3586 - DNA, 30 bp, Artificial Sequence
  Synthetic primer
acgttggatgaaaccagcttgttgcttccc

SEQ ID NO: 3587 - DNA, 30 bp, Artificial Sequence
  Synthetic primer
acgttggatgagaagaagctgttcagaccc

SEQ ID NO: 3588 - DNA, 30 bp, Artificial Sequence
  Synthetic primer
acgttggatgacacagacagacactcccac

SEQ ID NO: 3589 - DNA, 31 bp, Artificial Sequence
  Synthetic primer
acgttggatgacttctcactctttctggtaa

SEQ ID NO: 3590 - DNA, 30 bp, Artificial Sequence
  Synthetic primer
acgttggatgtgacctgccgacttctcact

SEQ ID NO: 3591 - DNA, 30 bp, Artificial Sequence
  Synthetic primer
acgttggatgtccatcatctaggaccttgg

SEQ ID NO: 3592 - DNA, 30 bp, Artificial Sequence
  Synthetic primer
acgttggatgtgcagggttctgaaaggaag

SEQ ID NO: 3593 - DNA, 30 bp, Artificial Sequence
  Synthetic primer
acgttggatgttatgtgcaggcatgatggc

SEQ ID NO: 3594 - DNA, 30 bp, Artificial Sequence
  Synthetic primer
acgttggatggtgctaagtgctttccatcc

SEQ ID NO: 3595 - DNA, 30 bp, Artificial Sequence
  Synthetic primer
acgttggatgactgcccatctgagaaatgg

SEQ ID NO: 3596 - DNA, 30 bp, Artificial Sequence
  Synthetic primer
acgttggatgccatccctccaactcagaac

SEQ ID NO: 3597 - DNA, 30 bp, Artificial Sequence
  Synthetic primer
acgttggatgtaggtgtgctcccatttagc

SEQ ID NO: 3598 - DNA, 30 bp, Artificial Sequence
  Synthetic primer
acgttggatgcacaccctggcatgaatgtg

SEQ ID NO: 3599 - DNA, 30 bp, Artificial Sequence
  Synthetic primer
acgttggatgtcagagatatgcactgcaag

SEQ ID NO: 3600 - DNA, 30 bp, Artificial Sequence; identical to SEQ ID NO: 3599
  Synthetic primer

SEQ ID NO: 3601 - DNA, 30 bp, Artificial Sequence; identical to SEQ ID NO: 3598
  Synthetic primer

SEQ ID NO: 3602 - DNA, 30 bp, Artificial Sequence
  Synthetic primer
acgttggatgccagggtgtgttctaatacg

SEQ ID NO: 3603 - DNA, 30 bp, Artificial Sequence
  Synthetic primer
acgttggatgaagtcactaaccccacacac

SEQ ID NO: 3604 - DNA, 30 bp, Artificial Sequence
  Synthetic primer
acgttggatgccatctcacattgagatggg

SEQ ID NO: 3605 - DNA, 30 bp, Artificial Sequence
  Synthetic primer
acgttggatgccaccaactctccaaaactc

SEQ ID NO: 3606 - DNA, 30 bp, Artificial Sequence
  Synthetic primer
acgttggatggcttacctttttcccatccc

SEQ ID NO: 3607 - DNA, 30 bp, Artificial Sequence
  Synthetic primer
acgttggatgcaatgctgttaccaggaacc

SEQ ID NO: 3608 - DNA, 30 bp, Artificial Sequence
  Synthetic primer
acgttggatgctgctctgtgtcagcagaaa

SEQ ID NO: 3609 - DNA, 30 bp, Artificial Sequence
  Synthetic primer
acgttggatgatggaggctttgtagctagg

SEQ ID NO: 3610 - DNA, 30 bp, Artificial Sequence
  Synthetic primer
acgttggatgtacaggcactggcgaagaag

SEQ ID NO: 3611 - DNA, 30 bp, Artificial Sequence
  Synthetic primer
acgttggatgctgcctgcaagttcccattg

SEQ ID NO: 3612 - DNA, 30 bp, Artificial Sequence
  Synthetic primer
acgttggatgtcctgactctctcaaaaccc

SEQ ID NO: 3613 - DNA, 30 bp, Artificial Sequence
  Synthetic primer
acgttggatgcaaacaaggtcccagcattc

SEQ ID NO: 3614 - DNA, 30 bp, Artificial Sequence
  Synthetic primer
acgttggatgaaagcccctctagcaaaagg

SEQ ID NO: 3615 - DNA, 30 bp, Artificial Sequence
  Synthetic primer
acgttggatgaaactctctcgttgctgtgg

SEQ ID NO: 3616 - DNA, 30 bp, Artificial Sequence
  Synthetic primer
acgttggatgtaaaggttaagtgccctgcc

SEQ ID NO: 3617 - DNA, 30 bp, Artificial Sequence
  Synthetic primer
acgttggatgagtgagagatagtgttgcag

SEQ ID NO: 3618 - DNA, 31 bp, Artificial Sequence
  Synthetic primer
acgttggatgactaggctcccctgctcacta

SEQ ID NO: 3619 - DNA, 30 bp, Artificial Sequence
  Synthetic primer
acgttggatgaccaactctgtaagagcagc

SEQ ID NO: 3620 - DNA, 30 bp, Artificial Sequence
  Synthetic primer
acgttggatgatgagatgatggatgctggg

SEQ ID NO: 3621 - DNA, 30 bp, Artificial Sequence
  Synthetic primer
acgttggatgtcccacactgattatggtgc

SEQ ID NO: 3622 - DNA, 30 bp, Artificial Sequence
  Synthetic primer
acgttggatggattacaggtgtcagcaacc

SEQ ID NO: 3623 - DNA, 30 bp, Artificial Sequence
  Synthetic primer
acgttggatggccagaattaccctgatacc

SEQ ID NO: 3624 - DNA, 30 bp, Artificial Sequence
  Synthetic primer
acgttggatgttcccggttaagcagttctc

SEQ ID NO: 3625 - DNA, 30 bp, Artificial Sequence
  Synthetic primer
acgttggatggtgaaaccccgtctctacta

SEQ ID NO: 3626 - DNA, 30 bp, Artificial Sequence
  Synthetic primer
acgttggatgtcactgcaacatctgccttc

SEQ ID NO: 3627 - DNA, 30 bp, Artificial Sequence
  Synthetic primer
acgttggatgttagctggtcatgatggcag

SEQ ID NO: 3628 - DNA, 30 bp, Artificial Sequence
  Synthetic primer
acgttggatgaaggcagatgttgcagtgag

SEQ ID NO: 3629 - DNA, 30 bp, Artificial Sequence
  Synthetic primer
acgttggatgttagctctacgatccatgtc

SEQ ID NO: 3630 - DNA, 30 bp, Artificial Sequence
  Synthetic primer
acgttggatgcctccagaactgtaagacag

SEQ ID NO: 3631 - DNA, 30 bp, Artificial Sequence
  Synthetic primer
acgttggatgaaacgcatggtatcagttcc

SEQ ID NO: 3632 - DNA, 30 bp, Artificial Sequence
  Synthetic primer
acgttggatgttccatatttccagggtgtg

SEQ ID NO: 3633 - DNA, 30 bp, Artificial Sequence
  Synthetic primer
acgttggatggaccttgggtaagatattgg

SEQ ID NO: 3634 - DNA, 30 bp, Artificial Sequence
  Synthetic primer
acgttggatggaccgtggatagtcatctcc

SEQ ID NO: 3635 - DNA, 30 bp, Artificial Sequence
  Synthetic primer
acgttggatgcacaggcttagctgctggtg

SEQ ID NO: 3636 - DNA, 30 bp, Artificial Sequence
  Synthetic primer
acgttggatgtctccaccttgtctcagagc

SEQ ID NO: 3637 - DNA, 30 bp, Artificial Sequence
  Synthetic primer
acgttggatgtgcctggctccacaggctta

SEQ ID NO: 3638 - DNA, 30 bp, Artificial Sequence
  Synthetic primer
acgttggatgtcatgtaggttggctctgac

SEQ ID NO: 3639 - DNA, 30 bp, Artificial Sequence
  Synthetic primer
acgttggatggctagaaatcaccagcaacc

SEQ ID NO: 3640 - DNA, 30 bp, Artificial Sequence
  Synthetic primer
acgttggatgacaagctggagagcttcact

SEQ ID NO: 3641 - DNA, 30 bp, Artificial Sequence
  Synthetic primer
acgttggatgaaaagcaccactccaatcac

SEQ ID NO: 3642 - DNA, 30 bp, Artificial Sequence
  Synthetic primer
acgttggatgaacctctgacctcaggtgat

SEQ ID NO: 3643 - DNA, 30 bp, Artificial Sequence
  Synthetic primer
acgttggatgaattgtggttaatggctggg

SEQ ID NO: 3644 - DNA, 29 bp, Artificial Sequence
  Synthetic primer
acgttggatgactttgggaggccaaggtg

SEQ ID NO: 3645 - DNA, 30 bp, Artificial Sequence
  Synthetic primer
acgttggatgatgttggccaggctggtttc

SEQ ID NO: 3646 - DNA, 30 bp, Artificial Sequence
  Synthetic primer
acgttggatgttgaggtcacgggtttgaaa

SEQ ID NO: 3647 - DNA, 30 bp, Artificial Sequence
  Synthetic primer
acgttggatgccaccatgcccagctaattt

SEQ ID NO: 3648 - DNA, 30 bp, Artificial Sequence
  Synthetic primer
acgttggatgagcctgggaaacacagaaag

SEQ ID NO: 3649 - DNA, 30 bp, Artificial Sequence
  Synthetic primer
acgttggatgactgtaacctcgaactcgtg

SEQ ID NO: 3650 - DNA, 30 bp, Artificial Sequence
  Synthetic primer
acgttggatgagcaggtgacattaccagtc

SEQ ID NO: 3651 - DNA, 30 bp, Artificial Sequence
  Synthetic primer
acgttggatggtcattagggaaatgcccac

SEQ ID NO: 3652 - DNA, 30 bp, Artificial Sequence; identical to SEQ ID NO: 3650
  Synthetic primer

SEQ ID NO: 3653 - DNA, 30 bp, Artificial Sequence; identical to SEQ ID NO: 3651
  Synthetic primer

SEQ ID NO: 3654 - DNA, 30 bp, Artificial Sequence
  Synthetic primer
acgttggatgggttgcaccattgcatattc

SEQ ID NO: 3655 - DNA, 30 bp, Artificial Sequence
  Synthetic primer
acgttggatgtaatgtcacctgctggtgag

SEQ ID NO: 3656 - DNA, 30 bp, Artificial Sequence
  Synthetic primer
acgttggatgctgcattggtatcaggactg

SEQ ID NO: 3657 - DNA, 30 bp, Artificial Sequence
  Synthetic primer
acgttggatgctagcttatttcactcggcc

SEQ ID NO: 3658 - DNA, 30 bp, Artificial Sequence
  Synthetic primer
acgttggatgtacatatcaccacacctggc

SEQ ID NO: 3659 - DNA, 30 bp, Artificial Sequence
  Synthetic primer
acgttggatgtgagcccaggagttcaagac

SEQ ID NO: 3660 - DNA, 30 bp, Artificial Sequence
  Synthetic primer
acgttggatgtccccagtttgcatcttgac

SEQ ID NO: 3661 - DNA, 31 bp, Artificial Sequence
  Synthetic primer
acgttggatgatttgttaaaattcatagaac

SEQ ID NO: 3662 - DNA, 30 bp, Artificial Sequence
  Synthetic primer
acgttggatgtgacttgagaccaggagttc

SEQ ID NO: 3663 - DNA, 30 bp, Artificial Sequence
  Synthetic primer
acgttggatgacatatgtgccaccacactc

SEQ ID NO: 3664 - DNA, 30 bp, Artificial Sequence
  Synthetic primer
acgttggatgagttcaagaccagcctggac

SEQ ID NO: 3665 - DNA, 30 bp, Artificial Sequence
  Synthetic primer
acgttggatgatatgtgccaccacactcgg

SEQ ID NO: 3666 - DNA, 30 bp, Artificial Sequence
  Synthetic primer
acgttggatgtgatcacagctcactgcaac

SEQ ID NO: 3667 - DNA, 30 bp, Artificial Sequence
  Synthetic primer
acgttggatgtgtggtggcacatatgtttg

SEQ ID NO: 3668 - DNA, 30 bp, Artificial Sequence
  Synthetic primer
acgttggatgtcccaagtagtgtgcatgcc

SEQ ID NO: 3669 - DNA, 30 bp, Artificial Sequence
  Synthetic primer
acgttggatgtgtgatcacgccactgtact

SEQ ID NO: 3670 - DNA, 30 bp, Artificial Sequence
  Synthetic primer
acgttggatgtggagtgcagtagtgtgacc

SEQ ID NO: 3671 - DNA, 30 bp, Artificial Sequence
  Synthetic primer
acgttggatgacactacttgggaggctgag

SEQ ID NO: 3672 - DNA, 30 bp, Artificial Sequence
  Synthetic primer
acgttggatggagtgagatgtgtagatgac

SEQ ID NO: 3673 - DNA, 30 bp, Artificial Sequence
  Synthetic primer
acgttggatggcctaatttcacctctcttg

SEQ ID NO: 3674 - DNA, 30 bp, Artificial Sequence; identical to SEQ ID NO: 3672
  Synthetic primer

SEQ ID NO: 3675 - DNA, 30 bp, Artificial Sequence; identical to SEQ ID NO: 3673
  Synthetic primer

SEQ ID NO: 3676 - DNA, 30 bp, Artificial Sequence
  Synthetic primer
acgttggatgtaacatggcgagagctcatc

SEQ ID NO: 3677 - DNA, 30 bp, Artificial Sequence
  Synthetic primer
acgttggatgagctaggactacaggtacac

SEQ ID NO: 3678 - DNA, 30 bp, Artificial Sequence
  Synthetic primer
acgttggatgtacaggtacacacgacagtg

SEQ ID NO: 3679 - DNA, 30 bp, Artificial Sequence
  Synthetic primer
acgttggatgactagactgagtaacatggc

SEQ ID NO: 3680 - DNA, 30 bp, Artificial Sequence; identical to SEQ ID NO: 3679
  Synthetic primer

SEQ ID NO: 3681 - DNA, 30 bp, Artificial Sequence; identical to SEQ ID NO: 3678
  Synthetic primer

SEQ ID NO: 3682 - DNA, 30 bp, Artificial Sequence
  Synthetic primer
acgttggatgatctcaggtgatccacccac

SEQ ID NO: 3683 - DNA, 30 bp, Artificial Sequence
  Synthetic primer
acgttggatgtgggcgcagtggcttgtaat

SEQ ID NO: 3684 - DNA, 30 bp, Artificial Sequence
  Synthetic primer
acgttggatggcatctgttaaaaacaggcc

SEQ ID NO: 3685 - DNA, 30 bp, Artificial Sequence
  Synthetic primer
acgttggatgactcctgatctcaggtgatc

SEQ ID NO: 3686 - DNA, 30 bp, Artificial Sequence
  Synthetic primer
acgttggatgactggcttccaggttcaagt

SEQ ID NO: 3687 - DNA, 30 bp, Artificial Sequence; identical to SEQ ID NO: 2520
  Synthetic primer

SEQ ID NO: 3688 - DNA, 30 bp, Artificial Sequence
  Synthetic primer
acgttggatgaatcttggctcaccacaacc

SEQ ID NO: 3689 - DNA, 30 bp, Artificial Sequence
  Synthetic primer
acgttggatgatgcctgtaatcccagctac

SEQ ID NO: 3690 - DNA, 30 bp, Artificial Sequence
  Synthetic primer
acgttggatgtagtagcattccaagtgccc

SEQ ID NO: 3691 - DNA, 30 bp, Artificial Sequence
  Synthetic primer
acgttggatgataatctatgtcctagattg

SEQ ID NO: 3692 - DNA, 30 bp, Artificial Sequence; identical to SEQ ID NO: 3690
  Synthetic primer

SEQ ID NO: 3693 - DNA, 30 bp, Artificial Sequence; identical to SEQ ID NO: 3691
  Synthetic primer

SEQ ID NO: 3694 - DNA, 31 bp, Artificial Sequence
  Synthetic primer
acgttggatgggaatgctactatttgaaggg

SEQ ID NO: 3695 - DNA, 30 bp, Artificial Sequence
  Synthetic primer
acgttggatgtctgtatctttctggtgatg

SEQ ID NO: 3696 - DNA, 30 bp, Artificial Sequence
  Synthetic primer
acgttggatgagttacattccagggagtgg

SEQ ID NO: 3697 - DNA, 30 bp, Artificial Sequence
  Synthetic primer
acgttggatgccaagacatttctgcactcg

SEQ ID NO: 3698 - DNA, 30 bp, Artificial Sequence
  Synthetic primer
acgttggatgtgcaaagtggtggaggaaag

SEQ ID NO: 3699 - DNA, 30 bp, Artificial Sequence
  Synthetic primer
acgttggatgatttttcccggcatctgacc

SEQ ID NO: 3700 - DNA, 30 bp, Artificial Sequence
  Synthetic primer
acgttggatgtgagatggatctggagccac

SEQ ID NO: 3701 - DNA, 30 bp, Artificial Sequence
  Synthetic primer
acgttggatggaaagtgtccttagcttgcc

SEQ ID NO: 3702 - DNA, 30 bp, Artificial Sequence
  Synthetic primer
acgttggatgtcgcttcaacaagttgcttg

SEQ ID NO: 3703 - DNA, 30 bp, Artificial Sequence
  Synthetic primer
acgttggatgagagtgagactctgtctcaa

SEQ ID NO: 3704 - DNA, 30 bp, Artificial Sequence
  Synthetic primer
acgttggatgactttgggaggctgaagtag

SEQ ID NO: 3705 - DNA, 30 bp, Artificial Sequence
  Synthetic primer
acgttggatgcatcacccctggctaatttt

SEQ ID NO: 3706 - DNA, 30 bp, Artificial Sequence
  Synthetic primer
acgttggatgatgtgagtgcctaatacctg

SEQ ID NO: 3707 - DNA, 30 bp, Artificial Sequence
  Synthetic primer
acgttggatggccctgaattgatactgaac

SEQ ID NO: 3708 - DNA, 31 bp, Artificial Sequence
  Synthetic primer
acgttggatgccttatctctctaagacatgc

SEQ ID NO: 3709 - DNA, 30 bp, Artificial Sequence
  Synthetic primer
acgttggatgaccattatcatcttcccagg

SEQ ID NO: 3710 - DNA, 30 bp, Artificial Sequence
  Synthetic primer
acgttggatgccttgatgcatcatctctcc

SEQ ID NO: 3711 - DNA, 30 bp, Artificial Sequence
  Synthetic primer
acgttggatgttgcctctatcctgatctgg

SEQ ID NO: 3712 - DNA, 30 bp, Artificial Sequence; identical to SEQ ID NO: 3711
  Synthetic primer

SEQ ID NO: 3713 - DNA, 30 bp, Artificial Sequence; identical to SEQ ID NO: 3710
  Synthetic primer

SEQ ID NO: 3714 - DNA, 30 bp, Artificial Sequence
  Synthetic primer
acgttggatgcaagagcgaaactccatctc

SEQ ID NO: 3715 - DNA, 30 bp, Artificial Sequence
  Synthetic primer
acgttggatggtggtttgcagaggctattg

SEQ ID NO: 3716 - DNA, 30 bp, Artificial Sequence
  Synthetic primer
acgttggatgcaatagcctctgcaaaccac

SEQ ID NO: 3717 - DNA, 30 bp, Artificial Sequence
  Synthetic primer
acgttggatgcggaacatggcacatgaaag

SEQ ID NO: 3718 - DNA, 30 bp, Artificial Sequence
  Synthetic primer
acgttggatgaaagctcttgggctcaagtg

SEQ ID NO: 3719 - DNA, 30 bp, Artificial Sequence
  Synthetic primer
acgttggatgaatacagtgtgtgccagctg

SEQ ID NO: 3720 - DNA, 30 bp, Artificial Sequence
  Synthetic primer
acgttggatgctcatgttcatgctacaagc

SEQ ID NO: 3721 - DNA, 30 bp, Artificial Sequence
  Synthetic primer
acgttggatgaacaaatggagaaaggaggg

SEQ ID NO: 3722 - DNA, 30 bp, Artificial Sequence
  Synthetic primer
acgttggatgctcaacaaacagtggttgag

SEQ ID NO: 3723 - DNA, 30 bp, Artificial Sequence
  Synthetic primer
acgttggatgttctgctatgttgcatgacc

SEQ ID NO: 3724 - DNA, 30 bp, Artificial Sequence
  Synthetic primer
acgttggatgggcaggatctgctgtttttc

SEQ ID NO: 3725 - DNA, 30 bp, Artificial Sequence
  Synthetic primer
acgttggatgggttgagtacctgctatgtg

SEQ ID NO: 3726 - DNA, 30 bp, Artificial Sequence
  Synthetic primer
acgttggatgcccatagctctatgaacctg

SEQ ID NO: 3727 - DNA, 30 bp, Artificial Sequence
  Synthetic primer
acgttggatgatgtgctaagcaccatgctg

SEQ ID NO: 3728 - DNA, 30 bp, Artificial Sequence
  Synthetic primer
acgttggatgtcttctcctctagaagatgc

SEQ ID NO: 3729 - DNA, 30 bp, Artificial Sequence
  Synthetic primer
acgttggatgaaacagcagatcctgccttc

SEQ ID NO: 3730 - DNA, 30 bp, Artificial Sequence
  Synthetic primer
acgttggatgacaggttcatagagctatgg

SEQ ID NO: 3731 - DNA, 30 bp, Artificial Sequence
  Synthetic primer
acgttggatgcttgtctcaatcttctcctc

SEQ ID NO: 3732 - DNA, 30 bp, Artificial Sequence
  Synthetic primer
acgttggatgtgggccagcaatctatgcac

SEQ ID NO: 3733 - DNA, 30 bp, Artificial Sequence
  Synthetic primer
acgttggatgtttgcccttcattgctcctc

SEQ ID NO: 3734 - DNA, 30 bp, Artificial Sequence
  Synthetic primer
acgttggatgaagggcaaaggctgagaaag

SEQ ID NO: 3735 - DNA, 30 bp, Artificial Sequence
  Synthetic primer
acgttggatgtaaagtccaaactccttggc

SEQ ID NO: 3736 - DNA, 30 bp, Artificial Sequence
  Synthetic primer
acgttggatgcctcattcacattgatcagc

SEQ ID NO: 3737 - DNA, 30 bp, Artificial Sequence
  Synthetic primer
acgttggatgccataggacaaaaagtgcac

SEQ ID NO: 3738 - DNA, 30 bp, Artificial Sequence
  Synthetic primer
acgttggatgcggatcacttgagatcagga

SEQ ID NO: 3739 - DNA, 30 bp, Artificial Sequence
  Synthetic primer
acgttggatgtgctaccacacccagctaac

SEQ ID NO: 3740 - DNA, 30 bp, Artificial Sequence
  Synthetic primer
acgttggatgtctccaatcctgctcatggg

SEQ ID NO: 3741 - DNA, 30 bp, Artificial Sequence
  Synthetic primer
acgttggatgttgatacggcttccacagtg

SEQ ID NO: 3742 - DNA, 30 bp, Artificial Sequence
  Synthetic primer
acgttggatgatgagagcctttcttcaggg

SEQ ID NO: 3743 - DNA, 30 bp, Artificial Sequence
  Synthetic primer
acgttggatgtccaagaaggacagcagtag

SEQ ID NO: 3744 - DNA, 30 bp, Artificial Sequence
  Synthetic primer
acgttggatggggaaggaacttgttcagga

SEQ ID NO: 3745 - DNA, 30 bp, Artificial Sequence
  Synthetic primer
acgttggatggccaaaactgaagccttgag

SEQ ID NO: 3746 - DNA, 30 bp, Artificial Sequence
  Synthetic primer
acgttggatggcaaaacccagtgccaaaac

SEQ ID NO: 3747 - DNA, 30 bp, Artificial Sequence
  Synthetic primer
acgttggatggatcatccaagtatgctccc

SEQ ID NO: 3748 - DNA, 30 bp, Artificial Sequence
  Synthetic primer
acgttggatggcaagccttctgaaaagttg

SEQ ID NO: 3749 - DNA, 30 bp, Artificial Sequence
  Synthetic primer
acgttggatgaggtagggaaagaggaaaac

SEQ ID NO: 3750 - DNA, 30 bp, Artificial Sequence
  Synthetic primer
acgttggatgagctactcagtaggctgaag

SEQ ID NO: 3751 - DNA, 30 bp, Artificial Sequence
  Synthetic primer
acgttggatgtcatagctcattgcagcctc

SEQ ID NO: 3752 - DNA, 30 bp, Artificial Sequence; identical to SEQ ID NO: 3750
  Synthetic primer

SEQ ID NO: 3753 - DNA, 30 bp, Artificial Sequence
  Synthetic primer
acgttggatgcagtagtgcaatcatagctc

SEQ ID NO: 3754 - DNA, 30 bp, Artificial Sequence
  Synthetic primer
acgttggatgaaggtgataaagtcccctgg

SEQ ID NO: 3755 - DNA, 30 bp, Artificial Sequence
  Synthetic primer
acgttggatggtcacaccatgtatcctctg

SEQ ID NO: 3756 - DNA, 30 bp, Artificial Sequence
  Synthetic primer
acgttggatgaaagccacttgtgtctccag

SEQ ID NO: 3757 - DNA, 30 bp, Artificial Sequence
  Synthetic primer
acgttggatgagaccacattcccagacatc

SEQ ID NO: 3758 - DNA, 30 bp, Artificial Sequence
  Synthetic primer
acgttggatgggtgttctgcagatcatatc

SEQ ID NO: 3759 - DNA, 30 bp, Artificial Sequence
  Synthetic primer
acgttggatgtttattatccagggttgccc

SEQ ID NO: 3760 - DNA, 30 bp, Artificial Sequence
  Synthetic primer
acgttggatgaattgcttgaacctgggagg

SEQ ID NO: 3761 - DNA, 30 bp, Artificial Sequence
  Synthetic primer
acgttggatgaaggcagagtttccttctgt

SEQ ID NO: 3762 - DNA, 30 bp, Artificial Sequence
  Synthetic primer
acgttggatgtttcaccatgttggccagac

SEQ ID NO: 3763 - DNA, 30 bp, Artificial Sequence
  Synthetic primer
acgttggatgtaatcccagcactttgggtg

SEQ ID NO: 3764 - DNA, 30 bp, Artificial Sequence
  Synthetic primer
acgttggatggcatgacaaagtgtgggatc

SEQ ID NO: 3765 - DNA, 30 bp, Artificial Sequence
  Synthetic primer
acgttggatgcacctggccagaatcacttt

SEQ ID NO: 3766 - DNA, 30 bp, Artificial Sequence
  Synthetic primer
acgttggatgatggccaactcctttcttct

SEQ ID NO: 3767 - DNA, 30 bp, Artificial Sequence
  Synthetic primer
acgttggatgaagataagctgagagaccag

SEQ ID NO: 3768 - DNA, 30 bp, Artificial Sequence
  Synthetic primer
acgttggatgtggctcgatctcgactcatg

SEQ ID NO: 3769 - DNA, 30 bp, Artificial Sequence
  Synthetic primer
acgttggatgggtggtgcacacctgtaatc

SEQ ID NO: 3770 - DNA, 30 bp, Artificial Sequence
  Synthetic primer
acgttggatgaggttgccatgagtcgagat

SEQ ID NO: 3771 - DNA, 30 bp, Artificial Sequence
  Synthetic primer
acgttggatgtccagggtgctgttttttgg

SEQ ID NO: 3772 - DNA, 30 bp, Artificial Sequence
  Synthetic primer
acgttggatgttctgttttgccctcccttc

SEQ ID NO: 3773 - DNA, 30 bp, Artificial Sequence
  Synthetic primer
acgttggatgttatgagggagcagtgtgtg

SEQ ID NO: 3774 - DNA, 30 bp, Artificial Sequence; identical to SEQ ID NO: 3772
  Synthetic primer

SEQ ID NO: 3775 - DNA, 30 bp, Artificial Sequence; identical to SEQ ID NO: 3773
  Synthetic primer

SEQ ID NO: 3776 - DNA, 30 bp, Artificial Sequence
  Synthetic primer
acgttggatgagtgagaccctgtctctaag

SEQ ID NO: 3777 - DNA, 30 bp, Artificial Sequence
  Synthetic primer
acgttggatggggtgccaattatctgcttg

SEQ ID NO: 3778 - DNA, 30 bp, Artificial Sequence
  Synthetic primer
acgttggatgccaaaaactaccacatgctc

SEQ ID NO: 3779 - DNA, 30 bp, Artificial Sequence
  Synthetic primer
acgttggatgcatcgctatatagtgctctg

SEQ ID NO: 3780 - DNA, 30 bp, Artificial Sequence
  Synthetic primer
acgttggatgatgcccagctcacaatcatg

SEQ ID NO: 3781 - DNA, 30 bp, Artificial Sequence
  Synthetic primer
acgttggatgttgggtggtgaacatatgtg

SEQ ID NO: 3782 - DNA, 30 bp, Artificial Sequence
  Synthetic primer
acgttggatggtccgctggattgctttatc

SEQ ID NO: 3783 - DNA, 30 bp, Artificial Sequence
  Synthetic primer
acgttggatgcagtgtgagactccatctca

SEQ ID NO: 3784 - DNA, 30 bp, Artificial Sequence
  Synthetic primer
acgttggatgaacatgattaaggataaagc

SEQ ID NO: 3785 - DNA, 30 bp, Artificial Sequence
  Synthetic primer
acgttggatgtccccggaatgatacatgac

SEQ ID NO: 3786 - DNA, 30 bp, Artificial Sequence
  Synthetic primer
acgttggatgaaagcaatccagcggacaag

SEQ ID NO: 3787 - DNA, 30 bp, Artificial Sequence
  Synthetic primer
acgttggatgactcgactagctagtcttgg

SEQ ID NO: 3788 - DNA, 30 bp, Artificial Sequence
  Synthetic primer
acgttggatgttggcattgacagaggagag

SEQ ID NO: 3789 - DNA, 30 bp, Artificial Sequence; identical to SEQ ID NO: 3786
  Synthetic primer

SEQ ID NO: 3790 - DNA, 30 bp, Artificial Sequence
  Synthetic primer
acgttggatgtactgagcccagtagtaagg

SEQ ID NO: 3791 - DNA, 30 bp, Artificial Sequence
  Synthetic primer
acgttggatgctccctgtgtacctcatttc

SEQ ID NO: 3792 - DNA, 30 bp, Artificial Sequence
  Synthetic primer
acgttggatgtgggcgacagagtgagactc

SEQ ID NO: 3793 - DNA, 30 bp, Artificial Sequence
  Synthetic primer
acgttggatgcatgttggccaggctagtct

SEQ ID NO: 3794 - DNA, 30 bp, Artificial Sequence
  Synthetic primer
acgttggatgagtagagacgaggtttcacc

SEQ ID NO: 3795 - DNA, 30 bp, Artificial Sequence
  Synthetic primer
acgttggatgaggtgggcagatcacaaggt

SEQ ID NO: 3796 - DNA, 30 bp, Artificial Sequence
  Synthetic primer
acgttggatgaagtgctgggattatgagcc

SEQ ID NO: 3797 - DNA, 30 bp, Artificial Sequence
  Synthetic primer
acgttggatgtgggtgtgtctccagtaaag

SEQ ID NO: 3798 - DNA, 30 bp, Artificial Sequence
  Synthetic primer
acgttggatggggaagaataagagcccatc

SEQ ID NO: 3799 - DNA, 30 bp, Artificial Sequence
  Synthetic primer
acgttggatgccagccagtagcagagtttt

SEQ ID NO: 3800 - DNA, 30 bp, Artificial Sequence
  Synthetic primer
acgttggatgaagtgcaatggcgcgatctc

SEQ ID NO: 3801 - DNA, 30 bp, Artificial Sequence
  Synthetic primer
acgttggatgtacttgggaagctgaggcag

SEQ ID NO: 3802 - DNA, 30 bp, Artificial Sequence
  Synthetic primer
acgttggatgtctgcttctcttcctgtgtg

SEQ ID NO: 3803 - DNA, 30 bp, Artificial Sequence
  Synthetic primer
acgttggatgaagcacaaaacgtggtccag

SEQ ID NO: 3804 - DNA, 30 bp, Artificial Sequence
  Synthetic primer
acgttggatgaggtgaaatgtggaccacac

SEQ ID NO: 3805 - DNA, 30 bp, Artificial Sequence
  Synthetic primer
acgttggatgggcagttctcctagctaaag

SEQ ID NO: 3806 - DNA, 30 bp, Artificial Sequence
  Synthetic primer
acgttggatgattacaggcatgagccactg

SEQ ID NO: 3807 - DNA, 30 bp, Artificial Sequence
  Synthetic primer
acgttggatgggattgctttctggttgtgc

SEQ ID NO: 3808 - DNA, 30 bp, Artificial Sequence; identical to SEQ ID NO: 3807
  Synthetic primer

SEQ ID NO: 3809 - DNA, 30 bp, Artificial Sequence
  Synthetic primer
acgttggatggcctcccaaattgctgagat

SEQ ID NO: 3810 - DNA, 30 bp, Artificial Sequence
  Synthetic primer
acgttggatgaagaatcgcttgaacccagg

SEQ ID NO: 3811 - DNA, 30 bp, Artificial Sequence
  Synthetic primer
acgttggatgatggagtttctctctgtcgc

SEQ ID NO: 3812 - DNA, 30 bp, Artificial Sequence
  Synthetic primer
acgttggatgcatgagcgagttcacatggg

SEQ ID NO: 3813 - DNA, 30 bp, Artificial Sequence
  Synthetic primer
acgttggatgtggacctaaatactggtggg

SEQ ID NO: 3814 - DNA, 30 bp, Artificial Sequence; identical to SEQ ID NO: 3813
  Synthetic primer

SEQ ID NO: 3815 - DNA, 30 bp, Artificial Sequence; identical to SEQ ID NO: 3812
  Synthetic primer

SEQ ID NO: 3816 - DNA, 30 bp, Artificial Sequence
  Synthetic primer
acgttggatggttcatttcccggcattctc

SEQ ID NO: 3817 - DNA, 30 bp, Artificial Sequence
  Synthetic primer
acgttggatggacctgtgctgagaaacaag

SEQ ID NO: 3818 - DNA, 30 bp, Artificial Sequence
  Synthetic primer
acgttggatggacatagttctgacctcacc

SEQ ID NO: 3819 - DNA, 30 bp, Artificial Sequence
  Synthetic primer
acgttggatgttatgaggaccaggtgctag

SEQ ID NO: 3820 - DNA, 30 bp, Artificial Sequence
  Synthetic primer
acgttggatgcccgagggatgagtattttg

SEQ ID NO: 3821 - DNA, 30 bp, Artificial Sequence
  Synthetic primer
acgttggatgtaggagggcgattacccaca

SEQ ID NO: 3822 - DNA, 30 bp, Artificial Sequence
  Synthetic primer
acgttggatgtttttcctcctcccacagac

SEQ ID NO: 3823 - DNA, 30 bp, Artificial Sequence
  Synthetic primer
acgttggatgggcaccagagttaagacaac

SEQ ID NO: 3824 - DNA, 30 bp, Artificial Sequence
  Synthetic primer
acgttggatgccactattttttccccactc

SEQ ID NO: 3825 - DNA, 31 bp, Artificial Sequence
  Synthetic primer
acgttggatggcaggctaaaaacattccatg

SEQ ID NO: 3826 - DNA, 30 bp, Artificial Sequence
  Synthetic primer
acgttggatggggagttctctcaatttacc

SEQ ID NO: 3827 - DNA, 30 bp, Artificial Sequence
  Synthetic primer
acgttggatgggcagaatagttgttggtag

SEQ ID NO: 3828 - DNA, 30 bp, Artificial Sequence
  Synthetic primer
acgttggatgctattctgccatagccttgc

SEQ ID NO: 3829 - DNA, 30 bp, Artificial Sequence
  Synthetic primer
acgttggatgtctatgcctcagcaagcatg

SEQ ID NO: 3830 - DNA, 30 bp, Artificial Sequence
  Synthetic primer
acgttggatgtgttccccaaagctaaggag

SEQ ID NO: 3831 - DNA, 30 bp, Artificial Sequence; identical to SEQ ID NO: 3828
  Synthetic primer

SEQ ID NO: 3832 - DNA, 30 bp, Artificial Sequence
  Synthetic primer
acgttggatgtcactgctgctcttgactag

SEQ ID NO: 3833 - DNA, 30 bp, Artificial Sequence
  Synthetic primer
acgttggatgggacagacagagagaaaacc

SEQ ID NO: 3834 - DNA, 30 bp, Artificial Sequence; identical to SEQ ID NO: 3832
  Synthetic primer

SEQ ID NO: 3835 - DNA, 30 bp, Artificial Sequence; identical to SEQ ID NO: 3833
  Synthetic primer

SEQ ID NO: 3836 - DNA, 30 bp, Artificial Sequence
  Synthetic primer
acgttggatgtggagagaccaaactgagag

SEQ ID NO: 3837 - DNA, 30 bp, Artificial Sequence
  Synthetic primer
acgttggatgccctgcttagtaaataggcg

SEQ ID NO: 3838 - DNA, 30 bp, Artificial Sequence
  Synthetic primer
acgttggatggcatggtctgtagaagaagc

SEQ ID NO: 3839 - DNA, 30 bp, Artificial Sequence
  Synthetic primer
acgttggatgagacacattctgggaaggtc

SEQ ID NO: 3840 - DNA, 30 bp, Artificial Sequence
  Synthetic primer
acgttggatgtacagggattgtgatgtggg

SEQ ID NO: 3841 - DNA, 30 bp, Artificial Sequence
  Synthetic primer
acgttggatggggtactcttagctgagaac

SEQ ID NO: 3842 - DNA, 30 bp, Artificial Sequence
  Synthetic primer
acgttggatgattggcttgaggcatgagtg

SEQ ID NO: 3843 - DNA, 30 bp, Artificial Sequence
  Synthetic primer
acgttggatgagtttcctgacattccctgc

SEQ ID NO: 3844 - DNA, 30 bp, Artificial Sequence
  Synthetic primer
acgttggatgtcctcggtaagcagttgttg

SEQ ID NO: 3845 - DNA, 30 bp, Artificial Sequence
  Synthetic primer
acgttggatgccacatcacaatccctgtac

SEQ ID NO: 3846 - DNA, 30 bp, Artificial Sequence
  Synthetic primer
acgttggatgccacagtcattcaacacttg

SEQ ID NO: 3847 - DNA, 30 bp, Artificial Sequence
  Synthetic primer
acgttggatgggaatgtcaggaaacttagg

SEQ ID NO: 3848 - DNA, 30 bp, Artificial Sequence
  Synthetic primer
acgttggatgatagcctgcgcaggtgaaaa

SEQ ID NO: 3849 - DNA, 30 bp, Artificial Sequence
  Synthetic primer
acgttggatgagccaacccaaatccagaag

SEQ ID NO: 3850 - DNA, 30 bp, Artificial Sequence
  Synthetic primer
acgttggatgacaccaagagctggagtgat

SEQ ID NO: 3851 - DNA, 30 bp, Artificial Sequence
  Synthetic primer
acgttggatggtctgtcaggtcactaatgg

SEQ ID NO: 3852 - DNA, 30 bp, Artificial Sequence
  Synthetic primer
acgttggatgtggcacctagtacatgctag

SEQ ID NO: 3853 - DNA, 30 bp, Artificial Sequence; identical to SEQ ID NO: 148
  Synthetic primer

SEQ ID NO: 3854 - DNA, 30 bp, Artificial Sequence
  Synthetic primer
acgttggatgagagtgggtaagtgcacaag

SEQ ID NO: 3855 - DNA, 30 bp, Artificial Sequence
  Synthetic primer
acgttggatgtgggtgacagagttaagact

SEQ ID NO: 3856 - DNA, 30 bp, Artificial Sequence
  Synthetic primer
acgttggatgggtgtcccttcaggtctaaa

SEQ ID NO: 3857 - DNA, 30 bp, Artificial Sequence
  Synthetic primer
acgttggatgccatgcaaatgtccacacag

SEQ ID NO: 3858 - DNA, 30 bp, Artificial Sequence
  Synthetic primer
acgttggatgcttcattggttctctgcagc

SEQ ID NO: 3859 - DNA, 30 bp, Artificial Sequence
  Synthetic primer
acgttggatgcaacacgtgattccagaagg

SEQ ID NO: 3860 - DNA, 30 bp, Artificial Sequence
  Synthetic primer
acgttggatggtgggcttacaccatttctg

SEQ ID NO: 3861 - DNA, 30 bp, Artificial Sequence
  Synthetic primer
acgttggatgataccacccaactacccatc

SEQ ID NO: 3862 - DNA, 30 bp, Artificial Sequence
  Synthetic primer
acgttggatgtggggagaactttggtcaac

SEQ ID NO: 3863 - DNA, 30 bp, Artificial Sequence
  Synthetic primer
acgttggatgaaagggtacccagacttcac

SEQ ID NO: 3864 - DNA, 30 bp, Artificial Sequence
  Synthetic primer
acgttggatgatcttggctcaccacaaacc

SEQ ID NO: 3865 - DNA, 30 bp, Artificial Sequence
  Synthetic primer
acgttggatggcctgtaatctcagctactc

SEQ ID NO: 3866 - DNA, 30 bp, Artificial Sequence
  Synthetic primer
acgttggatgtactacatgtcacagttctg

SEQ ID NO: 3867 - DNA, 30 bp, Artificial Sequence
  Synthetic primer
acgttggatgcgctcactctgtgtatgtat

SEQ ID NO: 3868 - DNA, 30 bp, Artificial Sequence
  Synthetic primer
acgttggatgcaacttaaggagagctaggg

SEQ ID NO: 3869 - DNA, 30 bp, Artificial Sequence
  Synthetic primer
acgttggatgtcctccactggataacttgc

SEQ ID NO: 3870 - DNA, 30 bp, Artificial Sequence
  Synthetic primer
acgttggatggggtgagaaacatactcaac

SEQ ID NO: 3871 - DNA, 30 bp, Artificial Sequence
  Synthetic primer
acgttggatggtattgtatgtactcaccgc

SEQ ID NO: 3872 - DNA, 32 bp, Artificial Sequence
  Synthetic primer
acgttggatggctgtttttccaaattctttcc

SEQ ID NO: 3873 - DNA, 30 bp, Artificial Sequence
  Synthetic primer
acgttggatgtccaaatcacctttcttagc

SEQ ID NO: 3874 - DNA, 30 bp, Artificial Sequence
  Synthetic primer
acgttggatgtaagaatgggagctcagtgg

SEQ ID NO: 3875 - DNA, 30 bp, Artificial Sequence
  Synthetic primer
acgttggatgacctggatgcaaactggttg

SEQ ID NO: 3876 - DNA, 30 bp, Artificial Sequence
  Synthetic primer
acgttggatggatgtgacaacaagagaggc

SEQ ID NO: 3877 - DNA, 30 bp, Artificial Sequence
  Synthetic primer
acgttggatgacagtcctcaccatcacaac

SEQ ID NO: 3878 - DNA, 30 bp, Artificial Sequence
  Synthetic primer
acgttggatgaccctcttgctttcattggg

SEQ ID NO: 3879 - DNA, 30 bp, Artificial Sequence
  Synthetic primer
acgttggatgctctatataggcatgtgggc

SEQ ID NO: 3880 - DNA, 30 bp, Artificial Sequence
  Synthetic primer
acgttggatgaaaacaaagtccctgccttc

SEQ ID NO: 3881 - DNA, 30 bp, Artificial Sequence
  Synthetic primer
acgttggatgttctgccacagcatttacac

SEQ ID NO: 3882 - DNA, 30 bp, Artificial Sequence
  Synthetic primer
acgttggatggcattgcacagttcagtttc

SEQ ID NO: 3883 - DNA, 30 bp, Artificial Sequence
  Synthetic primer
acgttggatggttggcactcagtaattagc

SEQ ID NO: 3884 - DNA, 30 bp, Artificial Sequence
  Synthetic primer
acgttggatgtgactcaatctccctctctc

SEQ ID NO: 3885 - DNA, 30 bp, Artificial Sequence
  Synthetic primer
acgttggatgttcaggatggaagtgtgagg

SEQ ID NO: 3886 - DNA, 30 bp, Artificial Sequence
  Synthetic primer
acgttggatgacatccaggcagtagaatgg

SEQ ID NO: 3887 - DNA, 30 bp, Artificial Sequence
  Synthetic primer
acgttggatgtgagtggattcccatgactc

SEQ ID NO: 3888 - DNA, 30 bp, Artificial Sequence
  Synthetic primer
acgttggatggtcaattcagtggcaaggac

SEQ ID NO: 3889 - DNA, 30 bp, Artificial Sequence
  Synthetic primer
acgttggatgtaaggagcccatcaatgcag

SEQ ID NO: 3890 - DNA, 30 bp, Artificial Sequence
  Synthetic primer
acgttggatgtgtaagacccttgaggtagc

SEQ ID NO: 3891 - DNA, 30 bp, Artificial Sequence
  Synthetic primer
acgttggatggcccactggtactcattttc

SEQ ID NO: 3892 - DNA, 30 bp, Artificial Sequence
  Synthetic primer
acgttggatggaaggaagaagggcaaaggg

SEQ ID NO: 3893 - DNA, 29 bp, Artificial Sequence
  Synthetic primer
acgttggatggtgatggagttggtgggag

SEQ ID NO: 3894 - DNA, 30 bp, Artificial Sequence
  Synthetic primer
acgttggatgtgcaattgaggagactaggg

SEQ ID NO: 3895 - DNA, 30 bp, Artificial Sequence
  Synthetic primer
acgttggatgtcccaccaactccatcactt

SEQ ID NO: 3896 - DNA, 30 bp, Artificial Sequence
  Synthetic primer
acgttggatgggccatgcaatcggattttc

SEQ ID NO: 3897 - DNA, 30 bp, Artificial Sequence
  Synthetic primer
acgttggatgtgttgttgcatatgcagggc

SEQ ID NO: 3898 - DNA, 30 bp, Artificial Sequence
  Synthetic primer
acgttggatgaagaagtgcctttcacctcc

SEQ ID NO: 3899 - DNA, 30 bp, Artificial Sequence
  Synthetic primer
acgttggatgacatacccaagactgggaag

SEQ ID NO: 3900 - DNA, 30 bp, Artificial Sequence
  Synthetic primer
acgttggatgtgccttgctggatttcagac

SEQ ID NO: 3901 - DNA, 30 bp, Artificial Sequence
  Synthetic primer
acgttggatgggtatgcaattccaagtggg

SEQ ID NO: 3902 - DNA, 30 bp, Artificial Sequence
  Synthetic primer
acgttggatgtacctccactttgcagggta

SEQ ID NO: 3903 - DNA, 30 bp, Artificial Sequence
  Synthetic primer
acgttggatgtggaaaagctgcagagactc

SEQ ID NO: 3904 - DNA, 30 bp, Artificial Sequence
  Synthetic primer
acgttggatgatggtagatccactagcagc

SEQ ID NO: 3905 - DNA, 30 bp, Artificial Sequence
  Synthetic primer
acgttggatgctgcgtactttcacagtctg

SEQ ID NO: 3906 - DNA, 30 bp, Artificial Sequence
  Synthetic primer
acgttggatgaaacaaacaaccccatcaac

SEQ ID NO: 3907 - DNA, 30 bp, Artificial Sequence
  Synthetic primer
acgttggatgttcatgtgtcttttggctgc

SEQ ID NO: 3908 - DNA, 30 bp, Artificial Sequence
  Synthetic primer
acgttggatggagataccatctcacaccag

SEQ ID NO: 3909 - DNA, 30 bp, Artificial Sequence
  Synthetic primer
acgttggatgtttctccacatcctctccag

SEQ ID NO: 3910 - DNA, 31 bp, Artificial Sequence
  Synthetic primer
acgttggatggcaaaggtgactcttgttatg

SEQ ID NO: 3911 - DNA, 30 bp, Artificial Sequence
  Synthetic primer
acgttggatgctcaagttcaaagtttcacg

SEQ ID NO: 3912 - DNA, 30 bp, Artificial Sequence
  Synthetic primer
acgttggatgggtttatcaggggtttcagc

SEQ ID NO: 3913 - DNA, 30 bp, Artificial Sequence
  Synthetic primer
acgttggatgtggcaggaagtgaaagacac

SEQ ID NO: 3914 - DNA, 30 bp, Artificial Sequence
  Synthetic primer
acgttggatggttgagatttgggtgaggac

SEQ ID NO: 3915 - DNA, 30 bp, Artificial Sequence
  Synthetic primer
acgttggatgcaccaccacacccagttaat

SEQ ID NO: 3916 - DNA, 30 bp, Artificial Sequence
  Synthetic primer
acgttggatgcatttctggaaggaagtggc

SEQ ID NO: 3917 - DNA, 30 bp, Artificial Sequence
  Synthetic primer
acgttggatgttattctgatggtagtgctg

SEQ ID NO: 3918 - DNA, 30 bp, Artificial Sequence
  Synthetic primer
acgttggatgggcccaggcttatttctcat

SEQ ID NO: 3919 - DNA, 30 bp, Artificial Sequence
  Synthetic primer
acgttggatgacacagatctgtttggctgg

SEQ ID NO: 3920 - DNA, 30 bp, Artificial Sequence
  Synthetic primer
acgttggatgaaagcttacaggcagcagag

SEQ ID NO: 3921 - DNA, 30 bp, Artificial Sequence
  Synthetic primer
acgttggatgttagcgcagctattcaccac

SEQ ID NO: 3922 - DNA, 30 bp, Artificial Sequence
  Synthetic primer
acgttggatgcctccatgaattgcaccttg

SEQ ID NO: 3923 - DNA, 30 bp, Artificial Sequence
  Synthetic primer
acgttggatggggacaaagccagaatactc

SEQ ID NO: 3924 - DNA, 30 bp, Artificial Sequence
  Synthetic primer
acgttggatggagagatagagataccagcg

SEQ ID NO: 3925 - DNA, 30 bp, Artificial Sequence
  Synthetic primer
acgttggatgtcttccaaaaagcccccaac

SEQ ID NO: 3926 - DNA, 30 bp, Artificial Sequence
  Synthetic primer
acgttggatgtagctgtgtgtgggatttcc

SEQ ID NO: 3927 - DNA, 30 bp, Artificial Sequence
  Synthetic primer
acgttggatggtgctttgcatcttctggtc

SEQ ID NO: 3928 - DNA, 30 bp, Artificial Sequence
  Synthetic primer
acgttggatgggtgagacagagagagattc

SEQ ID NO: 3929 - DNA, 30 bp, Artificial Sequence
  Synthetic primer
acgttggatgagggacagtagccacatatg

SEQ ID NO: 3930 - DNA, 30 bp, Artificial Sequence
  Synthetic primer
acgttggatgcttctaacagtgaaactggg

SEQ ID NO: 3931 - DNA, 30 bp, Artificial Sequence
  Synthetic primer
acgttggatgtctctttgcctctttcatgc

SEQ ID NO: 3932 - DNA, 30 bp, Artificial Sequence
  Synthetic primer
acgttggatgatcagaggttccaacgtcac

SEQ ID NO: 3933 - DNA, 30 bp, Artificial Sequence
  Synthetic primer
acgttggatgatgagctgggtaagtgaagg

SEQ ID NO: 3934 - DNA, 30 bp, Artificial Sequence
  Synthetic primer
acgttggatgtatattctctcccctcccac

SEQ ID NO: 3935 - DNA, 30 bp, Artificial Sequence
  Synthetic primer
acgttggatgcggcttttcctaggaaaacc

SEQ ID NO: 3936 - DNA, 30 bp, Artificial Sequence
  Synthetic primer
acgttggatgtagcacttactttgccctgc

SEQ ID NO: 3937 - DNA, 30 bp, Artificial Sequence
  Synthetic primer
acgttggatggcttccactccaatagagac

SEQ ID NO: 3938 - DNA, 30 bp, Artificial Sequence
  Synthetic primer
acgttggatgtattttttggagatagggtc

SEQ ID NO: 3939 - DNA, 30 bp, Artificial Sequence
  Synthetic primer
acgttggatgttgagtcaaggagtttgagg

SEQ ID NO: 3940 - DNA, 30 bp, Artificial Sequence
  Synthetic primer
acgttggatgatctgaaccacttccaaggc

SEQ ID NO: 3941 - DNA, 30 bp, Artificial Sequence
  Synthetic primer
acgttggatgagtagaccagagagcattgc

SEQ ID NO: 3942 - DNA, 30 bp, Artificial Sequence
  Synthetic primer
acgttggatgaaagaatctggcctggcatg

SEQ ID NO: 3943 - DNA, 30 bp, Artificial Sequence
  Synthetic primer
acgttggatgtcgggttttatcatgttggc

SEQ ID NO: 3944 - DNA, 30 bp, Artificial Sequence
  Synthetic primer
acgttggatggcctcccaaagtgctaagat

SEQ ID NO: 3945 - DNA, 30 bp, Artificial Sequence
  Synthetic primer
acgttggatgactatgcctaggtctccttc

SEQ ID NO: 3946 - DNA, 30 bp, Artificial Sequence
  Synthetic primer
acgttggatgcatcccggagagaaactttg

SEQ ID NO: 3947 - DNA, 30 bp, Artificial Sequence
  Synthetic primer
acgttggatgaatgcagaatggtggttccc

SEQ ID NO: 3948 - DNA, 30 bp, Artificial Sequence
  Synthetic primer
acgttggatgcttaatgccactgaaaacac

SEQ ID NO: 3949 - DNA, 31 bp, Artificial Sequence
  Synthetic primer
acgttggatggaggcattccctcaatttttc

SEQ ID NO: 3950 - DNA, 30 bp, Artificial Sequence
  Synthetic primer
acgttggatgtagcttgtgatctgggacac

SEQ ID NO: 3951 - DNA, 30 bp, Artificial Sequence
  Synthetic primer
acgttggatggccagaaagttgttggcttg

SEQ ID NO: 3952 - DNA, 30 bp, Artificial Sequence
  Synthetic primer
acgttggatggaacaatgctggcacatgtc

SEQ ID NO: 3953 - DNA, 30 bp, Artificial Sequence
  Synthetic primer
acgttggatgacctgagatgatcacagtcc

SEQ ID NO: 3954 - DNA, 30 bp, Artificial Sequence
  Synthetic primer
acgttggatgtattggtccggttactggtg

SEQ ID NO: 3955 - DNA, 30 bp, Artificial Sequence
  Synthetic primer
acgttggatgccctcagtgacagttttacg

SEQ ID NO: 3956 - DNA, 30 bp, Artificial Sequence
  Synthetic primer
acgttggatgtagttgtttgagtgactggg

SEQ ID NO: 3957 - DNA, 30 bp, Artificial Sequence
  Synthetic primer
acgttggatgactgtgaaacaccagtaacc

SEQ ID NO: 3958 - DNA, 30 bp, Artificial Sequence
  Synthetic primer
acgttggatgcgacagaaagagctaagagg

SEQ ID NO: 3959 - DNA, 30 bp, Artificial Sequence
  Synthetic primer
acgttggatgtgctgtggcactcagtttag

SEQ ID NO: 3960 - DNA, 31 bp, Artificial Sequence
  Synthetic primer
acgttggatggagcaacaccctgtctcaaaa

SEQ ID NO: 3961 - DNA, 30 bp, Artificial Sequence
  Synthetic primer
acgttggatgttgatttgtgcatacctggg

SEQ ID NO: 3962 - DNA, 30 bp, Artificial Sequence
  Synthetic primer
acgttggatgatagcattatgtttcccagg

SEQ ID NO: 3963 - DNA, 30 bp, Artificial Sequence
  Synthetic primer
acgttggatgtggatttgataaaggcctgc

SEQ ID NO: 3964 - DNA, 30 bp, Artificial Sequence
  Synthetic primer
acgttggatggcgcagtatctctaagcttg

SEQ ID NO: 3965 - DNA, 30 bp, Artificial Sequence
  Synthetic primer
acgttggatgaaacacgcaccctactgtga

SEQ ID NO: 3966 - DNA, 30 bp, Artificial Sequence
  Synthetic primer
acgttggatgaccgctgatgctgtttctac

SEQ ID NO: 3967 - DNA, 30 bp, Artificial Sequence
  Synthetic primer
acgttggatgcagcccggttatgtgatttc

SEQ ID NO: 3968 - DNA, 30 bp, Artificial Sequence
  Synthetic primer
acgttggatgcggacttggcggcttaacag

SEQ ID NO: 3969 - DNA, 30 bp, Artificial Sequence
  Synthetic primer
acgttggatgctgccttcctcctccttttc

SEQ ID NO: 3970 - DNA, 30 bp, Artificial Sequence
  Synthetic primer
acgttggatgactaaagccagctcgctcgc

SEQ ID NO: 3971 - DNA, 31 bp, Artificial Sequence
  Synthetic primer
acgttggatgtttccccggcagcccccggat

SEQ ID NO: 3972 - DNA, 30 bp, Artificial Sequence
  Synthetic primer
acgttggatgaaactccccgcgagcgatcg

SEQ ID NO: 3973 - DNA, 29 bp, Artificial Sequence
  Synthetic primer
acgttggatgctgggtccagcggacggac

SEQ ID NO: 3974 - DNA, 30 bp, Artificial Sequence
  Synthetic primer
acgttggatgtgtgattggcccgtcgcttc

SEQ ID NO: 3975 - DNA, 30 bp, Artificial Sequence
  Synthetic primer
acgttggatgggttgtgaatgacagtcgcc

SEQ ID NO: 3976 - DNA, 30 bp, Artificial Sequence
  Synthetic primer
acgttggatgaaaagggagtgacctctggg

SEQ ID NO: 3977 - DNA, 31 bp, Artificial Sequence
  Synthetic primer
acgttggatgaatcggcgctgctggtagcta

SEQ ID NO: 3978 - DNA, 30 bp, Artificial Sequence
  Synthetic primer
acgttggatgataatactctcccgtgcgtc

SEQ ID NO: 3979 - DNA, 30 bp, Artificial Sequence
  Synthetic primer
acgttggatgagagccagcaggtcttaaag

SEQ ID NO: 3980 - DNA, 30 bp, Artificial Sequence
  Synthetic primer
acgttggatgagggtaaatccccgtgtttc

SEQ ID NO: 3981 - DNA, 30 bp, Artificial Sequence
  Synthetic primer
acgttggatgacggcagagcacatgtagta

SEQ ID NO: 3982 - DNA, 18 bp, Artificial Sequence
  Synthetic primer
gtgcccttcccacgtgtg

SEQ ID NO: 3983 - DNA, 20 bp, Artificial Sequence
  Synthetic primer
ggttttgccttgggctgctt

SEQ ID NO: 3984 - DNA, 20 bp, Artificial Sequence
  Synthetic primer
agaagctatagctctgagcc

SEQ ID NO: 3985 - DNA, 19 bp, Artificial Sequence
  Synthetic primer
cgtgctggcttagactctc

SEQ ID NO: 3986 - DNA, 18 bp, Artificial Sequence
  Synthetic primer
ggaggtgcaactggcagg

SEQ ID NO: 3987 - DNA, 19 bp, Artificial Sequence
  Synthetic primer
tgaaggctaggccagcatg

SEQ ID NO: 3988 - DNA, 19 bp, Artificial Sequence
  Synthetic primer
ccttggcagggcatcgact

SEQ ID NO: 3989 - DNA, 20 bp, Artificial Sequence
  Synthetic primer
atggactctgttccctttcc

SEQ ID NO: 3990 - DNA, 19 bp, Artificial Sequence
  Synthetic primer
ggcatttgtgctcctctgg

SEQ ID NO: 3991 - DNA, 20 bp, Artificial Sequence
  Synthetic primer
caaatgccatgtggaccaga

SEQ ID NO: 3992 - DNA, 19 bp, Artificial Sequence
  Synthetic primer
gggaagcaacagtggcgta

SEQ ID NO: 3993 - DNA, 19 bp, Artificial Sequence
  Synthetic primer
gcagagggaagggaggaaa

SEQ ID NO: 3994 - DNA, 22 bp, Artificial Sequence
  Synthetic primer
aagtacccaactattgccaaat

SEQ ID NO: 3995 - DNA, 19 bp, Artificial Sequence
  Synthetic primer
gtgtgtgtatgtgcgtgcg

SEQ ID NO: 3996 - DNA, 21 bp, Artificial Sequence
  Synthetic primer
gttgtgttgctgagggaatat

SEQ ID NO: 3997 - DNA, 19 bp, Artificial Sequence
  Synthetic primer
cacagccagggctcactca

SEQ ID NO: 3998 - DNA, 18 bp, Artificial Sequence
  Synthetic primer
tccgggcttgccagttcc

SEQ ID NO: 3999 - DNA, 20 bp, Artificial Sequence
  Synthetic primer
gggatgtgggaggatagaca

SEQ ID NO: 4000 - DNA, 20 bp, Artificial Sequence
  Synthetic primer
tcttactcccatccccaaag

SEQ ID NO: 4001 - DNA, 19 bp, Artificial Sequence
  Synthetic primer
aagtggacagagctcctcc

SEQ ID NO: 4002 - DNA, 18 bp, Artificial Sequence
  Synthetic primer
ggtccccatgtctcagcc

SEQ ID NO: 4003 - DNA, 19 bp, Artificial Sequence
  Synthetic primer
cagagaggtgaggctgcca

SEQ ID NO: 4004 - DNA, 21 bp, Artificial Sequence
  Synthetic primer
aggtgacattggtaaagatcc

SEQ ID NO: 4005 - DNA, 21 bp, Artificial Sequence
  Synthetic primer
gcatggtctttgcaggtattc

SEQ ID NO: 4006 - DNA, 20 bp, Artificial Sequence
  Synthetic primer
aggcggacatggaaaacatc

SEQ ID NO: 4007 - DNA, 20 bp, Artificial Sequence
  Synthetic primer
gctattgtggcacttgggaa

SEQ ID NO: 4008 - DNA, 22 bp, Artificial Sequence
  Synthetic primer
tgtctccaaaggctaataattg

SEQ ID NO: 4009 - DNA, 20 bp, Artificial Sequence
  Synthetic primer
ctccccacctctttcttcta

SEQ ID NO: 4010 - DNA, 18 bp, Artificial Sequence
  Synthetic primer
ccagaacgcgccctcctc

SEQ ID NO: 4011 - DNA, 20 bp, Artificial Sequence
  Synthetic primer
ccactgcatgtctgggaaaa

SEQ ID NO: 4012 - DNA, 19 bp, Artificial Sequence
  Synthetic primer
ggcgtcttggaggaggtac

SEQ ID NO: 4013 - DNA, 18 bp, Artificial Sequence
  Synthetic primer
acaggcatgcgccacagc

SEQ ID NO: 4014 - DNA, 19 bp, Artificial Sequence
  Synthetic primer
atcccagctactcaggagg

SEQ ID NO: 4015 - DNA, 20 bp, Artificial Sequence
  Synthetic primer
tctgatcgtatcactcccct

SEQ ID NO: 4016 - DNA, 20 bp, Artificial Sequence
  Synthetic primer
gtctgggcctgagatatgga

SEQ ID NO: 4017 - DNA, 20 bp, Artificial Sequence
  Synthetic primer
gattcccattctgctggaac

SEQ ID NO: 4018 - DNA, 18 bp, Artificial Sequence
  Synthetic primer
gccccaacaacctcaccc

SEQ ID NO: 4019 - DNA, 19 bp, Artificial Sequence
  Synthetic primer
gccaaagaccagcgtcaac

SEQ ID NO: 4020 - DNA, 23 bp, Artificial Sequence
  Synthetic primer
catttgcctcatttttcttttgt

SEQ ID NO: 4021 - DNA, 23 bp, Artificial Sequence
  Synthetic primer
ggtctggagcataaaatgtataa

SEQ ID NO: 4022 - DNA, 24 bp, Artificial Sequence
  Synthetic primer
caaatactgtactctagttaattt

SEQ ID NO: 4023 - DNA, 23 bp, Artificial Sequence
  Synthetic primer
ctttgtcctcaatttttaacact

SEQ ID NO: 4024 - DNA, 24 bp, Artificial Sequence
  Synthetic primer
gatatcccacaatcactattttta

SEQ ID NO: 4025 - DNA, 21 bp, Artificial Sequence
  Synthetic primer
aaaatgtcagacagcacagag

SEQ ID NO: 4026 - DNA, 23 bp, Artificial Sequence
  Synthetic primer
aatatctgtaggtgcatataaac

SEQ ID NO: 4027 - DNA, 20 bp, Artificial Sequence
  Synthetic primer
gaaacaacagcattagggcc

SEQ ID NO: 4028 - DNA, 19 bp, Artificial Sequence
  Synthetic primer
cccacattcttcaccaccc

SEQ ID NO: 4029 - DNA, 20 bp, Artificial Sequence
  Synthetic primer
cctgctggggaatatggtct

SEQ ID NO: 4030 - DNA, 19 bp, Artificial Sequence
  Synthetic primer
gtccgtggtactgttcagg

SEQ ID NO: 4031 - DNA, 20 bp, Artificial Sequence
  Synthetic primer
gctccatttctttgccatcc

SEQ ID NO: 4032 - DNA, 21 bp, Artificial Sequence
  Synthetic primer
cttggatgacattcccaagtc

SEQ ID NO: 4033 - DNA, 19 bp, Artificial Sequence
  Synthetic primer
attggctttgccctgggtg

SEQ ID NO: 4034 - DNA, 20 bp, Artificial Sequence
  Synthetic primer
ccctctcaaggtgataccat

SEQ ID NO: 4035 - DNA, 24 bp, Artificial Sequence
  Synthetic primer
taggataactattcattaacttac

SEQ ID NO: 4036 - DNA, 23 bp, Artificial Sequence
  Synthetic primer
aactagtcacatctgaataaagt

SEQ ID NO: 4037 - DNA, 18 bp, Artificial Sequence
  Synthetic primer
aggggtgggagggtacag

SEQ ID NO: 4038 - DNA, 18 bp, Artificial Sequence
  Synthetic primer
acagcctcaagcccccga

SEQ ID NO: 4039 - DNA, 24 bp, Artificial Sequence
  Synthetic primer
aataatacacactgttagacaaaa

SEQ ID NO: 4040 - DNA, 19 bp, Artificial Sequence
  Synthetic primer
caccactgacccagctcaa

SEQ ID NO: 4041 - DNA, 21 bp, Artificial Sequence
  Synthetic primer
actaacactagttttgcctgg

SEQ ID NO: 4042 - DNA, 20 bp, Artificial Sequence
  Synthetic primer
gctgccaatttctatgcacg

SEQ ID NO: 4043 - DNA, 23 bp, Artificial Sequence
  Synthetic primer
aaaattatcttcctaggtatgca

SEQ ID NO: 4044 - DNA, 19 bp, Artificial Sequence
  Synthetic primer
cagtgtgtgaaggtcaggc

SEQ ID NO: 4045 - DNA, 20 bp, Artificial Sequence
  Synthetic primer
gtcaggcggctgaatcattg

SEQ ID NO: 4046 - DNA, 22 bp, Artificial Sequence
  Synthetic primer
gttttccaccagctatacatca

SEQ ID NO: 4047 - DNA, 22 bp, Artificial Sequence
  Synthetic primer
gttttccaccagctatacatca

SEQ ID NO: 4048 - DNA, 17 bp, Artificial Sequence
  Synthetic primer
acaggcgcccgccacca

SEQ ID NO: 4049 - DNA, 24 bp, Artificial Sequence
  Synthetic primer
ccttaaaggataaataggagtttt

SEQ ID NO: 4050 - DNA, 21 bp, Artificial Sequence
  Synthetic primer
ttgcaggagatgatgctagaa

SEQ ID NO: 4051 - DNA, 19 bp, Artificial Sequence
  Synthetic primer
tccccagccatctccaaca

SEQ ID NO: 4052 - DNA, 19 bp, Artificial Sequence
  Synthetic primer
gaggcacctcatgacatcc

SEQ ID NO: 4053 - DNA, 20 bp, Artificial Sequence
  Synthetic primer
acagtgtaatggaggtgtgg

SEQ ID NO: 4054 - DNA, 21 bp, Artificial Sequence
  Synthetic primer
gttgtgggtgtctcgattgta

SEQ ID NO: 4055 - DNA, 19 bp, Artificial Sequence
  Synthetic primer
gtggggttgtgggtgtctc

SEQ ID NO: 4056 - DNA, 20 bp, Artificial Sequence
  Synthetic primer
gattgaaaggagccagtgag

SEQ ID NO: 4057 - DNA, 21 bp, Artificial Sequence
  Synthetic primer
ggatagctaaatatgtggcac

SEQ ID NO: 4058 - DNA, 19 bp, Artificial Sequence
  Synthetic primer
tgacagccacttggagtgc

SEQ ID NO: 4059 - DNA, 25 bp, Artificial Sequence
  Synthetic primer
cctatctctgaaaaaaaaaaaaaaa

SEQ ID NO: 4060 - DNA, 20 bp, Artificial Sequence
  Synthetic primer
gtttcactctgtcacccagg

SEQ ID NO: 4061 - DNA, 19 bp, Artificial Sequence
  Synthetic primer
gccaggcatggtggcacat

SEQ ID NO: 4062 - DNA, 19 bp, Artificial Sequence
  Synthetic primer
agcatagggagaccccatc

SEQ ID NO: 4063 - DNA, 23 bp, Artificial Sequence
  Synthetic primer
ctggtggagtagaaaaaatatta

SEQ ID NO: 4064 - DNA, 22 bp, Artificial Sequence
  Synthetic primer
gaagggattttttaatgatggc

SEQ ID NO: 4065 - DNA, 20 bp, Artificial Sequence
  Synthetic primer
ccatggtgggaaaagaagag

SEQ ID NO: 4066 - DNA, 19 bp, Artificial Sequence
  Synthetic primer
tttcccaccatggacccca

SEQ ID NO: 4067 - DNA, 19 bp, Artificial Sequence
  Synthetic primer
gcgttgagggtgtgggatg

SEQ ID NO: 4068 - DNA, 20 bp, Artificial Sequence
  Synthetic primer
tcccattcatggccaaacct

SEQ ID NO: 4069 - DNA, 19 bp, Artificial Sequence
  Synthetic primer
ctaggtcagatccggggtg

SEQ ID NO: 4070 - DNA, 19 bp, Artificial Sequence
  Synthetic primer
ggtgattcgcatgcacagg

SEQ ID NO: 4071 - DNA, 19 bp, Artificial Sequence
  Synthetic primer
aagtcctgggaggatggga

SEQ ID NO: 4072 - DNA, 19 bp, Artificial Sequence
  Synthetic primer
ctgcttacagctctgcagc

SEQ ID NO: 4073 - DNA, 19 bp, Artificial Sequence
  Synthetic primer
ctgcagccactaagtggag

SEQ ID NO: 4074 - DNA, 20 bp, Artificial Sequence
  Synthetic primer
tccctgaagacctttctcca

SEQ ID NO: 4075 - DNA, 20 bp, Artificial Sequence
  Synthetic primer
atgactggattcaacagccc

SEQ ID NO: 4076 - DNA, 24 bp, Artificial Sequence
  Synthetic primer
cttttgatcattttctattttagc

SEQ ID NO: 4077 - DNA, 19 bp, Artificial Sequence
  Synthetic primer
ggcagtgaggcagacacca

SEQ ID NO: 4078 - DNA, 18 bp, Artificial Sequence
  Synthetic primer
gccaggagctccagtcca

SEQ ID NO: 4079 - DNA, 20 bp, Artificial Sequence
  Synthetic primer
gtatgctggctgaatggtct

SEQ ID NO: 4080 - DNA, 21 bp, Artificial Sequence
  Synthetic primer
cttcccctcaatgtcttctat

SEQ ID NO: 4081 - DNA, 20 bp, Artificial Sequence
  Synthetic primer
ggttgggaacccgaagaata

SEQ ID NO: 4082 - DNA, 22 bp, Artificial Sequence
  Synthetic primer
gagagaagcaacaaagtgagaa

SEQ ID NO: 4083 - DNA, 19 bp, Artificial Sequence
  Synthetic primer
tacattaatcccccccccc

SEQ ID NO: 4084 - DNA, 18 bp, Artificial Sequence
  Synthetic primer
ggccgagcggtgtagtgg

SEQ ID NO: 4085 - DNA, 19 bp, Artificial Sequence
  Synthetic primer
aaggccacttccaaacccc

SEQ ID NO: 4086 - DNA, 20 bp, Artificial Sequence
  Synthetic primer
aacagacagcagagagccat

SEQ ID NO: 4087 - DNA, 19 bp, Artificial Sequence
  Synthetic primer
cttcctgttcagccaccac

SEQ ID NO: 4088 - DNA, 19 bp, Artificial Sequence
  Synthetic primer
ccccctgtcttcctgactt

SEQ ID NO: 4089 - DNA, 21 bp, Artificial Sequence
  Synthetic primer
ttgcctcttgttaccccattt

SEQ ID NO: 4090 - DNA, 19 bp, Artificial Sequence
  Synthetic primer
ctggctgtgagactgtcag

SEQ ID NO: 4091 - DNA, 21 bp, Artificial Sequence
  Synthetic primer
agtgggaaatacctgagcaaa

SEQ ID NO: 4092 - DNA, 20 bp, Artificial Sequence
  Synthetic primer
tgccttacacagtggagaag

SEQ ID NO: 4093 - DNA, 21 bp, Artificial Sequence
  Synthetic primer
ttcagaaaagaagtgatcggc

SEQ ID NO: 4094 - DNA, 22 bp, Artificial Sequence
  Synthetic primer
ctgagaataatatccaagtcct

SEQ ID NO: 4095 - DNA, 19 bp, Artificial Sequence
  Synthetic primer
gctcgtggctcatgctacc

SEQ ID NO: 4096 - DNA, 22 bp, Artificial Sequence
  Synthetic primer
caaaaggcttgagacattgctt

SEQ ID NO: 4097 - DNA, 20 bp, Artificial Sequence
  Synthetic primer
cttggctatcagtgagttcc

SEQ ID NO: 4098 - DNA, 21 bp, Artificial Sequence
  Synthetic primer
aggtaaccaaacgatgtgtgt

SEQ ID NO: 4099 - DNA, 22 bp, Artificial Sequence
  Synthetic primer
ctaccctgtgatcacatatgaa

SEQ ID NO: 4100 - DNA, 23 bp, Artificial Sequence
  Synthetic primer
ggtttcttagaaaagaagggtaa

SEQ ID NO: 4101 - DNA, 22 bp, Artificial Sequence
  Synthetic primer
ccatagattaaggcaaagatcc

SEQ ID NO: 4102 - DNA, 20 bp, Artificial Sequence
  Synthetic primer
gatgagaggtctggcatgaa

SEQ ID NO: 4103 - DNA, 23 bp, Artificial Sequence
  Synthetic primer
aacacagagtaaaatgaagtttc

SEQ ID NO: 4104 - DNA, 22 bp, Artificial Sequence
  Synthetic primer
ccacgtatcttttgatgaacac

SEQ ID NO: 4105 - DNA, 22 bp, Artificial Sequence
  Synthetic primer
taaaccgcatttagcttatcca

SEQ ID NO: 4106 - DNA, 22 bp, Artificial Sequence
  Synthetic primer
gctttctttttactgctaggaa

SEQ ID NO: 4107 - DNA, 19 bp, Artificial Sequence
  Synthetic primer
gctgaccagaatacccagc

SEQ ID NO: 4108 - DNA, 19 bp, Artificial Sequence
  Synthetic primer
agacggcgggtgttctaac

SEQ ID NO: 4109 - DNA, 22 bp, Artificial Sequence
  Synthetic primer
catcagacatgataactaggag

SEQ ID NO: 4110 - DNA, 23 bp, Artificial Sequence
  Synthetic primer
aagaaaaatgccccacattttaa

SEQ ID NO: 4111 - DNA, 23 bp, Artificial Sequence
  Synthetic primer
taaaaggaaaaaagtgctgacat

SEQ ID NO: 4112 - DNA, 20 bp, Artificial Sequence
  Synthetic primer
cgccttgaacttcagcagca

SEQ ID NO: 4113 - DNA, 19 bp, Artificial Sequence
  Synthetic primer
acctgccctattcctggct

SEQ ID NO: 4114 - DNA, 19 bp, Artificial Sequence
  Synthetic primer
ctggccagaggcagagaga

SEQ ID NO: 4115 - DNA, 23 bp, Artificial Sequence
  Synthetic primer
aaaaaaaaattcccctccactta

SEQ ID NO: 4116 - DNA, 22 bp, Artificial Sequence
  Synthetic primer
ttttcacagttaaaacacccca

SEQ ID NO: 4117 - DNA, 20 bp, Artificial Sequence
  Synthetic primer
tgatgtcatctctctccctg

SEQ ID NO: 4118 - DNA, 20 bp, Artificial Sequence
  Synthetic primer
ctctccctgccatccaagta

SEQ ID NO: 4119 - DNA, 20 bp, Artificial Sequence
  Synthetic primer
agccacagaaaaccccatca

SEQ ID NO: 4120 - DNA, 20 bp, Artificial Sequence
  Synthetic primer
gggactgtctccgagtaact

SEQ ID NO: 4121 - DNA, 20 bp, Artificial Sequence
  Synthetic primer
gataagggagggagaagagg

SEQ ID NO: 4122 - DNA, 19 bp, Artificial Sequence
  Synthetic primer
tcaggcactgtctggagga

SEQ ID NO: 4123 - DNA, 20 bp, Artificial Sequence
  Synthetic primer
gacagtgctgagcagtcaca

SEQ ID NO: 4124 - DNA, 21 bp, Artificial Sequence
  Synthetic primer
tccttctcagtgcattacatc

SEQ ID NO: 4125 - DNA, 21 bp, Artificial Sequence
  Synthetic primer
gactaaccagtatcgaggttg

SEQ ID NO: 4126 - DNA, 19 bp, Artificial Sequence
  Synthetic primer
gtggaagcctagagtggag

SEQ ID NO: 4127 - DNA, 22 bp, Artificial Sequence
  Synthetic primer
gtctgctccaattttaagtaca

SEQ ID NO: 4128 - DNA, 21 bp, Artificial Sequence
  Synthetic primer
ctttaagggttcctgcttact

SEQ ID NO: 4129 - DNA, 20 bp, Artificial Sequence
  Synthetic primer
gcaaaggaagctggccagat

SEQ ID NO: 4130 - DNA, 22 bp, Artificial Sequence
  Synthetic primer
actttagtggtggatgtgatat

SEQ ID NO: 4131 - DNA, 21 bp, Artificial Sequence
  Synthetic primer
cattgcattggagggaaatgt

SEQ ID NO: 4132 - DNA, 19 bp, Artificial Sequence
  Synthetic primer
gtcgttctttgccaggagg

SEQ ID NO: 4133 - DNA, 21 bp, Artificial Sequence
  Synthetic primer
gttaatccctttggtgtgcaa

SEQ ID NO: 4134 - DNA, 19 bp, Artificial Sequence
  Synthetic primer
cccaaatccccgtcaccag

SEQ ID NO: 4135 - DNA, 20 bp, Artificial Sequence
  Synthetic primer
cacacacacacacagacaca

SEQ ID NO: 4136 - DNA, 23 bp, Artificial Sequence
  Synthetic primer
aataaatcagagcatcctgaaat

SEQ ID NO: 4137 - DNA, 22 bp, Artificial Sequence
  Synthetic primer
gtccatttgtgcaattctgtca

SEQ ID NO: 4138 - DNA, 22 bp, Artificial Sequence
  Synthetic primer
ttctttgttttccatttcaggg

SEQ ID NO: 4139 - DNA, 19 bp, Artificial Sequence
  Synthetic primer
gcacttggggtcttgggca

SEQ ID NO: 4140 - DNA, 20 bp, Artificial Sequence
  Synthetic primer
catttccaggggctgcttga

SEQ ID NO: 4141 - DNA, 20 bp, Artificial Sequence
  Synthetic primer
aagatgagatttgggtgggg

SEQ ID NO: 4142 - DNA, 19 bp, Artificial Sequence
  Synthetic primer
tcctcctttgccttctgcc

SEQ ID NO: 4143 - DNA, 19 bp, Artificial Sequence
  Synthetic primer
ccctgccatccctctctaa

SEQ ID NO: 4144 - DNA, 19 bp, Artificial Sequence
  Synthetic primer
gctcccagggcatcactgt

SEQ ID NO: 4145 - DNA, 22 bp, Artificial Sequence
  Synthetic primer
aatatcatattgggcgaatcag

SEQ ID NO: 4146 - DNA, 19 bp, Artificial Sequence
  Synthetic primer
cggatctccgctgtggtgt

SEQ ID NO: 4147 - DNA, 18 bp, Artificial Sequence
  Synthetic primer
gcacaaatgcgcggccac

SEQ ID NO: 4148 - DNA, 18 bp, Artificial Sequence
  Synthetic primer
ggctgtgctgccccaaga

SEQ ID NO: 4149 - DNA, 20 bp, Artificial Sequence
  Synthetic primer
ggtgtgacagtcatgtcacc

SEQ ID NO: 4150 - DNA, 22 bp, Artificial Sequence
  Synthetic primer
ccggaagtcattcacttaatct

SEQ ID NO: 4151 - DNA, 21 bp, Artificial Sequence
  Synthetic primer
tgctctcaacactttcatcac

SEQ ID NO: 4152 - DNA, 21 bp, Artificial Sequence
  Synthetic primer
ttaggattcatccttgcctct

SEQ ID NO: 4153 - DNA, 20 bp, Artificial Sequence
  Synthetic primer
gactgggtggcttaaacaac

SEQ ID NO: 4154 - DNA, 18 bp, Artificial Sequence
  Synthetic primer
gccttgggactagggccc

SEQ ID NO: 4155 - DNA, 19 bp, Artificial Sequence
  Synthetic primer
gggctccacgtgtctcttg

SEQ ID NO: 4156 - DNA, 19 bp, Artificial Sequence
  Synthetic primer
ccctggactgaccaactcc

SEQ ID NO: 4157 - DNA, 20 bp, Artificial Sequence
  Synthetic primer
cctcttaggagctctgagta

SEQ ID NO: 4158 - DNA, 20 bp, Artificial Sequence
  Synthetic primer
ggggtttgcaaaggcttcac

SEQ ID NO: 4159 - DNA, 19 bp, Artificial Sequence
  Synthetic primer
cccccaagctgatgctctc

SEQ ID NO: 4160 - DNA, 19 bp, Artificial Sequence
  Synthetic primer
catctcacagtgccctcct

SEQ ID NO: 4161 - DNA, 17 bp, Artificial Sequence
  Synthetic primer
ggggaggccccggatcc

SEQ ID NO: 4162 - DNA, 20 bp, Artificial Sequence
  Synthetic primer
acatgcacgcacacacacaa

SEQ ID NO: 4163 - DNA, 20 bp, Artificial Sequence
  Synthetic primer
gggtgtgtgtgtgtctatgc

SEQ ID NO: 4164 - DNA, 20 bp, Artificial Sequence
  Synthetic primer
catgccctggggtttggaat

SEQ ID NO: 4165 - DNA, 20 bp, Artificial Sequence
  Synthetic primer
cacctgtggccaagaccatt

SEQ ID NO: 4166 - DNA, 20 bp, Artificial Sequence
  Synthetic primer
tcgaaatgcctgcttggcta

SEQ ID NO: 4167 - DNA, 18 bp, Artificial Sequence
  Synthetic primer
ttcagccagccagccagc

SEQ ID NO: 4168 - DNA, 22 bp, Artificial Sequence
  Synthetic primer
tagtgtttcactgtttagaacg

SEQ ID NO: 4169 - DNA, 23 bp, Artificial Sequence
  Synthetic primer
ttaagtagttcttcttattcctg

SEQ ID NO: 4170 - DNA, 22 bp, Artificial Sequence
  Synthetic primer
ccttaacaaagaagtccaacca

SEQ ID NO: 4171 - DNA, 23 bp, Artificial Sequence
  Synthetic primer
cttcctctctctcataaatattg

SEQ ID NO: 4172 - DNA, 21 bp, Artificial Sequence
  Synthetic primer
gttgtccagaacagccttcta

SEQ ID NO: 4173 - DNA, 19 bp, Artificial Sequence
  Synthetic primer
gagatgggcgaagaggcaa

SEQ ID NO: 4174 - DNA, 20 bp, Artificial Sequence
  Synthetic primer
atgggcgaagaggcaaattg

SEQ ID NO: 4175 - DNA, 20 bp, Artificial Sequence
  Synthetic primer
caattgaaatagcccctcgc

SEQ ID NO: 4176 - DNA, 19 bp, Artificial Sequence
  Synthetic primer
aggtcctgtgtatccgcag

SEQ ID NO: 4177 - DNA, 22 bp, Artificial Sequence
  Synthetic primer
ggtaaacactcaatagctgttg

SEQ ID NO: 4178 - DNA, 22 bp, Artificial Sequence
  Synthetic primer
tcaagacgtttctttccattgt

SEQ ID NO: 4179 - DNA, 20 bp, Artificial Sequence
  Synthetic primer
gggcaaacactccttctgca

SEQ ID NO: 4180 - DNA, 19 bp, Artificial Sequence
  Synthetic primer
ggagaacggagggtgggaa

SEQ ID NO: 4181 - DNA, 19 bp, Artificial Sequence
  Synthetic primer
gagaacggagggtgggaag

SEQ ID NO: 4182 - DNA, 19 bp, Artificial Sequence
  Synthetic primer
acctgctcagactgggtac

SEQ ID NO: 4183 - DNA, 19 bp, Artificial Sequence
  Synthetic primer
ctgggtacgcagggtacag

SEQ ID NO: 4184 - DNA, 20 bp, Artificial Sequence
  Synthetic primer
tagcttcaggacctacagag

SEQ ID NO: 4185 - DNA, 20 bp, Artificial Sequence
  Synthetic primer
ggacatctctaggaaggttg

SEQ ID NO: 4186 - DNA, 21 bp, Artificial Sequence
  Synthetic primer
tttgtgctcctgttagaatcc

SEQ ID NO: 4187 - DNA, 20 bp, Artificial Sequence
  Synthetic primer
ctgatgttcccagcaaccct

SEQ ID NO: 4188 - DNA, 18 bp, Artificial Sequence
  Synthetic primer
gggcagggagtggtcaca

SEQ ID NO: 4189 - DNA, 20 bp, Artificial Sequence
  Synthetic primer
tcaccacactgacttccaca

SEQ ID NO: 4190 - DNA, 20 bp, Artificial Sequence
  Synthetic primer
acgtaccattttaacgcccc

SEQ ID NO: 4191 - DNA, 17 bp, Artificial Sequence
  Synthetic primer
gagtggggcagcggggc

SEQ ID NO: 4192 - DNA, 22 bp, Artificial Sequence
  Synthetic primer
cacgtgagccttaaagaatatg

SEQ ID NO: 4193 - DNA, 22 bp, Artificial Sequence
  Synthetic primer
caggaattaagaccatgattca

SEQ ID NO: 4194 - DNA, 21 bp, Artificial Sequence
  Synthetic primer
ctgcagttagcagctacaata

SEQ ID NO: 4195 - DNA, 21 bp, Artificial Sequence
  Synthetic primer
gaagcttggagcaagaacaca

SEQ ID NO: 4196 - DNA, 21 bp, Artificial Sequence
  Synthetic primer
atttaacccttcctggaatgc

SEQ ID NO: 4197 - DNA, 21 bp, Artificial Sequence
  Synthetic primer
ggtctacacttaagcatggca

SEQ ID NO: 4198 - DNA, 18 bp, Artificial Sequence
  Synthetic primer
gcatcagaccccatgccc

SEQ ID NO: 4199 - DNA, 19 bp, Artificial Sequence
  Synthetic primer
cggtcccaccttccttcct

SEQ ID NO: 4200 - DNA, 21 bp, Artificial Sequence
  Synthetic primer
ctagtagaaaccacctcttgg

SEQ ID NO: 4201 - DNA, 21 bp, Artificial Sequence
  Synthetic primer
cacggtagtgtgtgggaattt

SEQ ID NO: 4202 - DNA, 18 bp, Artificial Sequence
  Synthetic primer
cccacacactaccgtgcc

SEQ ID NO: 4203 - DNA, 20 bp, Artificial Sequence
  Synthetic primer
ttagcctcctagcttcactg

SEQ ID NO: 4204 - DNA, 19 bp, Artificial Sequence
  Synthetic primer
gggatggacacagaagcct

SEQ ID NO: 4205 - DNA, 19 bp, Artificial Sequence
  Synthetic primer
gcccagtgcacgagtgtag

SEQ ID NO: 4206 - DNA, 18 bp, Artificial Sequence
  Synthetic primer
cctccctccctcccacca

SEQ ID NO: 4207 - DNA, 19 bp, Artificial Sequence
  Synthetic primer
gggactcttcctgaggcag

SEQ ID NO: 4208 - DNA, 19 bp, Artificial Sequence
  Synthetic primer
gtcacctcctcagagaagc

SEQ ID NO: 4209 - DNA, 19 bp, Artificial Sequence
  Synthetic primer
cttagtgctgtcccctgtg

SEQ ID NO: 4210 - DNA, 22 bp, Artificial Sequence
  Synthetic primer
ttattatgaccccctaacactt

SEQ ID NO: 4211 - DNA, 19 bp, Artificial Sequence
  Synthetic primer
cctttggctggtcaccttc

SEQ ID NO: 4212 - DNA, 20 bp, Artificial Sequence
  Synthetic primer
cagaaaccacctgggttcct

SEQ ID NO: 4213 - DNA, 19 bp, Artificial Sequence
  Synthetic primer
gacagactcggtcccaagc

SEQ ID NO: 4214 - DNA, 25 bp, Artificial Sequence
  Synthetic primer
cacccttgctatttttttttttttt

SEQ ID NO: 4215 - DNA, 19 bp, Artificial Sequence
  Synthetic primer
ggctcaatctcggctcact

SEQ ID NO: 4216 - DNA, 18 bp, Artificial Sequence
  Synthetic primer
cctcgtgatccacccgcc

SEQ ID NO: 4217 - DNA, 20 bp, Artificial Sequence
  Synthetic primer
ctgtaaccagaggtgcacac

SEQ ID NO: 4218 - DNA, 22 bp, Artificial Sequence
  Synthetic primer
ctaaggtagggattacagaata

SEQ ID NO: 4219 - DNA, 20 bp, Artificial Sequence
  Synthetic primer
cagttcagctgttttgccca

SEQ ID NO: 4220 - DNA, 20 bp, Artificial Sequence
  Synthetic primer
ggaccatttcccacacttgc

SEQ ID NO: 4221 - DNA, 20 bp, Artificial Sequence
  Synthetic primer
gtgcatgtccagacccactt

SEQ ID NO: 4222 - DNA, 19 bp, Artificial Sequence
  Synthetic primer
tcgagcttggacttcctgg

SEQ ID NO: 4223 - DNA, 19 bp, Artificial Sequence
  Synthetic primer
gcccaggaagtccaagctc

SEQ ID NO: 4224 - DNA, 20 bp, Artificial Sequence
  Synthetic primer
agaggtatgctgtggaatcc

SEQ ID NO: 4225 - DNA, 23 bp, Artificial Sequence
  Synthetic primer
gcttctaatatagtataaagccc

SEQ ID NO: 4226 - DNA, 19 bp, Artificial Sequence
  Synthetic primer
gagcctgaaggggtgagat

SEQ ID NO: 4227 - DNA, 20 bp, Artificial Sequence
  Synthetic primer
gggacctccagaagtaaact

SEQ ID NO: 4228 - DNA, 20 bp, Artificial Sequence
  Synthetic primer
gctttttccttgtcccatcc

SEQ ID NO: 4229 - DNA, 25 bp, Artificial Sequence
  Synthetic primer
ttatagtcatgattatggtttattt

SEQ ID NO: 4230 - DNA, 19 bp, Artificial Sequence
  Synthetic primer
acgacctgggatcagagct

SEQ ID NO: 4231 - DNA, 20 bp, Artificial Sequence
  Synthetic primer
caaaggcagcgtcttcactt

SEQ ID NO: 4232 - DNA, 20 bp, Artificial Sequence
  Synthetic primer
cccttttctatgtggggcca

SEQ ID NO: 4233 - DNA, 21 bp, Artificial Sequence
  Synthetic primer
caaaactgttttcagcctcag

SEQ ID NO: 4234 - DNA, 24 bp, Artificial Sequence
  Synthetic primer
ccctgtctcagaaaaaaaaaaaaa

SEQ ID NO: 4235 - DNA, 24 bp, Artificial Sequence
  Synthetic primer
ccctgtctcagaaaaaaaaaaaaa

SEQ ID NO: 4236 - DNA, 19 bp, Artificial Sequence
  Synthetic primer
ggttgaggctgcattgagc

SEQ ID NO: 4237 - DNA, 21 bp, Artificial Sequence
  Synthetic primer
acacagtgagcccataaagaa

SEQ ID NO: 4238 - DNA, 18 bp, Artificial Sequence
  Synthetic primer
ggagcctgccacgtagtc

SEQ ID NO: 4239 - DNA, 19 bp, Artificial Sequence
  Synthetic primer
cctagcatggagcctgcca

SEQ ID NO: 4240 - DNA, 21 bp, Artificial Sequence
  Synthetic primer
ctcttctcaaaacagtggtag

SEQ ID NO: 4241 - DNA, 17 bp, Artificial Sequence
  Synthetic primer
gacaccccacccccgtc

SEQ ID NO: 4242 - DNA, 19 bp, Artificial Sequence
  Synthetic primer
gatgtggggccagcaatgg

SEQ ID NO: 4243 - DNA, 18 bp, Artificial Sequence
  Synthetic primer
gcagtggctctgccccat

SEQ ID NO: 4244 - DNA, 18 bp, Artificial Sequence
  Synthetic primer
tgccctggccatttcccc

SEQ ID NO: 4245 - DNA, 18 bp, Artificial Sequence
  Synthetic primer
tctgggacaggcctggca

SEQ ID NO: 4246 - DNA, 21 bp, Artificial Sequence
  Synthetic primer
gagaagccaatctgaaaaggc

SEQ ID NO: 4247 - DNA, 19 bp, Artificial Sequence
  Synthetic primer
cggttcactcttggcgttg

SEQ ID NO: 4248 - DNA, 17 bp, Artificial Sequence
  Synthetic primer
ggggtccccagcaggtg

SEQ ID NO: 4249 - DNA, 18 bp, Artificial Sequence
  Synthetic primer
gccgtgtgagcccacatc

SEQ ID NO: 4250 - DNA, 19 bp, Artificial Sequence
  Synthetic primer
gcatggccatgaggaggtc

SEQ ID NO: 4251 - DNA, 22 bp, Artificial Sequence
  Synthetic primer
ccctgtctctaaaagagaaaga

SEQ ID NO: 4252 - DNA, 18 bp, Artificial Sequence
  Synthetic primer
agctcctgtcctggggct

SEQ ID NO: 4253 - DNA, 20 bp, Artificial Sequence
  Synthetic primer
agaaacagagggagtctgac

SEQ ID NO: 4254 - DNA, 20 bp, Artificial Sequence
  Synthetic primer
gtaagcctcctaaaggcagg

SEQ ID NO: 4255 - DNA, 19 bp, Artificial Sequence
  Synthetic primer
tgctgtgtggctgttggtg

SEQ ID NO: 4256 - DNA, 21 bp, Artificial Sequence
  Synthetic primer
ttacattctgagactcactcc

SEQ ID NO: 4257 - DNA, 21 bp, Artificial Sequence
  Synthetic primer
gaacctatgggagcaaatcaa

SEQ ID NO: 4258 - DNA, 22 bp, Artificial Sequence
  Synthetic primer
tagaaataccagatcggataca

SEQ ID NO: 4259 - DNA, 21 bp, Artificial Sequence
  Synthetic primer
aacacacttctattgagccct

SEQ ID NO: 4260 - DNA, 18 bp, Artificial Sequence
  Synthetic primer
tgacagctgctgccgctc

SEQ ID NO: 4261 - DNA, 22 bp, Artificial Sequence
  Synthetic primer
gtgtgtgtgtgtggtttttttt

SEQ ID NO: 4262 - DNA, 22 bp, Artificial Sequence
  Synthetic primer
gtgtgtgtgtgtggtttttttt

SEQ ID NO: 4263 - DNA, 18 bp, Artificial Sequence
  Synthetic primer
ggctcactgcaacctccc

SEQ ID NO: 4264 - DNA, 21 bp, Artificial Sequence
  Synthetic primer
gtggaaagaagggagctcata

SEQ ID NO: 4265 - DNA, 21 bp, Artificial Sequence
  Synthetic primer
ctgtggctctgccatgatttt

SEQ ID NO: 4266 - DNA, 20 bp, Artificial Sequence
  Synthetic primer
gaatttgctgcagacagctc

SEQ ID NO: 4267 - DNA, 18 bp, Artificial Sequence
  Synthetic primer
cactgctgggtgggtctc

SEQ ID NO: 4268 - DNA, 19 bp, Artificial Sequence
  Synthetic primer
gtcacacagacttcgtccc

SEQ ID NO: 4269 - DNA, 18 bp, Artificial Sequence
  Synthetic primer
cagctccgcagacctgag

SEQ ID NO: 4270 - DNA, 17 bp, Artificial Sequence
  Synthetic primer
gggtgtggaggggcacc

SEQ ID NO: 4271 - DNA, 22 bp, Artificial Sequence
  Synthetic primer
tcaaaaaggtcataccaattcc

SEQ ID NO: 4272 - DNA, 20 bp, Artificial Sequence
  Synthetic primer
acagacctactactaggcct

SEQ ID NO: 4273 - DNA, 19 bp, Artificial Sequence
  Synthetic primer
cttcctttcccttcccctc

SEQ ID NO: 4274 - DNA, 21 bp, Artificial Sequence
  Synthetic primer
ctcagatacatgagcagcaca

SEQ ID NO: 4275 - DNA, 21 bp, Artificial Sequence
  Synthetic primer
ggtgagagaaatcagactgtg

SEQ ID NO: 4276 - DNA, 19 bp, Artificial Sequence
  Synthetic primer
cagattagctggctggggt

SEQ ID NO: 4277 - DNA, 19 bp, Artificial Sequence
  Synthetic primer
gcctggttgcaaactcctg

SEQ ID NO: 4278 - DNA, 26 bp, Artificial Sequence
  Synthetic primer
acctagctattttttttttttttttt

SEQ ID NO: 4279 - DNA, 19 bp, Artificial Sequence
  Synthetic primer
ggtgtcctgtgtcccagct

SEQ ID NO: 4280 - DNA, 20 bp, Artificial Sequence
  Synthetic primer
ctgtgtactcacaggctcaa

SEQ ID NO: 4281 - DNA, 18 bp, Artificial Sequence
  Synthetic primer
cgctaggtggtgccccag

SEQ ID NO: 4282 - DNA, 24 bp, Artificial Sequence
  Synthetic primer
tctctctctttcttactttttttt

SEQ ID NO: 4283 - DNA, 21 bp, Artificial Sequence
  Synthetic primer
aatctaggttgcctgatttcc

SEQ ID NO: 4284 - DNA, 22 bp, Artificial Sequence
  Synthetic primer
tctttcaagagataatccatgc

SEQ ID NO: 4285 - DNA, 19 bp, Artificial Sequence
  Synthetic primer
ggggactacaagtgcatgc

SEQ ID NO: 4286 - DNA, 20 bp, Artificial Sequence
  Synthetic primer
aggtacctcactccttcctt

SEQ ID NO: 4287 - DNA, 20 bp, Artificial Sequence
  Synthetic primer
gcctgggcaacaaagctaga

SEQ ID NO: 4288 - DNA, 19 bp, Artificial Sequence
  Synthetic primer
ggatcttcaggtgggtgca

SEQ ID NO: 4289 - DNA, 20 bp, Artificial Sequence
  Synthetic primer
gaaactaccctgactaaccc

SEQ ID NO: 4290 - DNA, 19 bp, Artificial Sequence
  Synthetic primer
gtgccaccctgtgtgtgtg

SEQ ID NO: 4291 - DNA, 20 bp, Artificial Sequence
  Synthetic primer
accagcaagccaacaaatcc

SEQ ID NO: 4292 - DNA, 20 bp, Artificial Sequence
  Synthetic primer
gcatatgtgtgcgtgcatgt

SEQ ID NO: 4293 - DNA, 22 bp, Artificial Sequence
  Synthetic primer
cagagcaagattctgtgaaaga

SEQ ID NO: 4294 - DNA, 22 bp, Artificial Sequence
  Synthetic primer
ttccttctttccttcctttctt

SEQ ID NO: 4295 - DNA, 22 bp, Artificial Sequence
  Synthetic primer
ttctttccttctttccttcctt

SEQ ID NO: 4296 - DNA, 23 bp, Artificial Sequence
  Synthetic primer
aaagaaagaaagaaaggaaggaa

SEQ ID NO: 4297 - DNA, 22 bp, Artificial Sequence
  Synthetic primer
aggaaggaaagaaggaaagaaa

SEQ ID NO: 4298 - DNA, 25 bp, Artificial Sequence
  Synthetic primer
tctttctttctttctttttttcttt

SEQ ID NO: 4299 - DNA, 22 bp, Artificial Sequence
  Synthetic primer
cctttctcttctcttctcttct

SEQ ID NO: 4300 - DNA, 22 bp, Artificial Sequence
  Synthetic primer
cctttctcttctcttctcttct

SEQ ID NO: 4301 - DNA, 23 bp, Artificial Sequence
  Synthetic primer
agaagctggaaaatatgacttat

SEQ ID NO: 4302 - DNA, 18 bp, Artificial Sequence
  Synthetic primer
acaatgatggccgggcgc

SEQ ID NO: 4303 - DNA, 25 bp, Artificial Sequence
  Synthetic primer
aaaataaactaatgcatactttgta

SEQ ID NO: 4304 - DNA, 22 bp, Artificial Sequence
  Synthetic primer
tccttcgtaataaactggcatt

SEQ ID NO: 4305 - DNA, 21 bp, Artificial Sequence
  Synthetic primer
ctgcctcaacttcatatgcca

SEQ ID NO: 4306 - DNA, 19 bp, Artificial Sequence
  Synthetic primer
gctatgctagtaggggagg

SEQ ID NO: 4307 - DNA, 22 bp, Artificial Sequence
  Synthetic primer
tcttggacattttggctgttat

SEQ ID NO: 4308 - DNA, 20 bp, Artificial Sequence
  Synthetic primer
tcaacctgtgggtttatggg

SEQ ID NO: 4309 - DNA, 19 bp, Artificial Sequence
  Synthetic primer
agtcctggagaggaggaag

SEQ ID NO: 4310 - DNA, 21 bp, Artificial Sequence
  Synthetic primer
agtagtttctgatggccttct

SEQ ID NO: 4311 - DNA, 18 bp, Artificial Sequence
  Synthetic primer
gcacatgccaccacaccc

SEQ ID NO: 4312 - DNA, 19 bp, Artificial Sequence
  Synthetic primer
cggctcactgcaacctctg

SEQ ID NO: 4313 - DNA, 21 bp, Artificial Sequence
  Synthetic primer
cagagatgaggcaagataagc

SEQ ID NO: 4314 - DNA, 21 bp, Artificial Sequence
  Synthetic primer
gacctaactaccaattcacag

SEQ ID NO: 4315 - DNA, 23 bp, Artificial Sequence
  Synthetic primer
gagctctgatagtgattgtgagt

SEQ ID NO: 4316 - DNA, 24 bp, Artificial Sequence
  Synthetic primer
cctggatatgtttttaaaaatgtt

SEQ ID NO: 4317 - DNA, 20 bp, Artificial Sequence
  Synthetic primer
ctgtaatcccagcgactcag

SEQ ID NO: 4318 - DNA, 22 bp, Artificial Sequence
  Synthetic primer
ggcttgaatttacctggcataa

SEQ ID NO: 4319 - DNA, 17 bp, Artificial Sequence
  Synthetic primer
gtccactgccccccgac

SEQ ID NO: 4320 - DNA, 22 bp, Artificial Sequence
  Synthetic primer
aatatcctcagggttaacctat

SEQ ID NO: 4321 - DNA, 20 bp, Artificial Sequence
  Synthetic primer
tctaccatcatctccaggga

SEQ ID NO: 4322 - DNA, 19 bp, Artificial Sequence
  Synthetic primer
gaccaggtgttggcagaga

SEQ ID NO: 4323 - DNA, 21 bp, Artificial Sequence
  Synthetic primer
attcagatgggatcacagaag

SEQ ID NO: 4324 - DNA, 19 bp, Artificial Sequence
  Synthetic primer
actcagctctcagagctgg

SEQ ID NO: 4325 - DNA, 19 bp, Artificial Sequence
  Synthetic primer
gaggcgcctcttcctcact

SEQ ID NO: 4326 - DNA, 19 bp, Artificial Sequence
  Synthetic primer
ccgcccacaaacacacacg

SEQ ID NO: 4327 - DNA, 20 bp, Artificial Sequence
  Synthetic primer
ggaggaggcatgtcacatga

SEQ ID NO: 4328 - DNA, 19 bp, Artificial Sequence
  Synthetic primer
tcaggtcaggaggatggag

SEQ ID NO: 4329 - DNA, 24 bp, Artificial Sequence
  Synthetic primer
agaagacaaatactaaacattgaa

SEQ ID NO: 4330 - DNA, 22 bp, Artificial Sequence
  Synthetic primer
gagaaaggaatggctattgatt

SEQ ID NO: 4331 - DNA, 19 bp, Artificial Sequence
  Synthetic primer
cacattgggtaaatgatga

SEQ ID NO: 4332 - DNA, 22 bp, Artificial Sequence
  Synthetic primer
tggagaaatgaaaatctcagga

SEQ ID NO: 4333 - DNA, 21 bp, Artificial Sequence
  Synthetic primer
gatgtcagcagcattgagaat

SEQ ID NO: 4334 - DNA, 21 bp, Artificial Sequence
  Synthetic primer
gacatcagacctatgccagga

SEQ ID NO: 4335 - DNA, 20 bp, Artificial Sequence
  Synthetic primer
ccccagtgatcctgagaaat

SEQ ID NO: 4336 - DNA, 20 bp, Artificial Sequence
  Synthetic primer
acaaagtctgctaactgggc

SEQ ID NO: 4337 - DNA, 20 bp, Artificial Sequence
  Synthetic primer
aagggatacctttgtcccca

SEQ ID NO: 4338 - DNA, 19 bp, Artificial Sequence
  Synthetic primer
caaggagctgccaaggaca

SEQ ID NO: 4339 - DNA, 21 bp, Artificial Sequence
  Synthetic primer
ccacctcacttttgttgcatt

SEQ ID NO: 4340 - DNA, 18 bp, Artificial Sequence
  Synthetic primer
gtagcctccacctcccag

SEQ ID NO: 4341 - DNA, 18 bp, Artificial Sequence
  Synthetic primer
actccagcctgggcgaca

SEQ ID NO: 4342 - DNA, 20 bp, Artificial Sequence
  Synthetic primer
ggaggtgttagtaggagaga

SEQ ID NO: 4343 - DNA, 19 bp, Artificial Sequence
  Synthetic primer
tgccatctcctctacctgg

SEQ ID NO: 4344 - DNA, 21 bp, Artificial Sequence
  Synthetic primer
ctcgacacatatcactcaaca

SEQ ID NO: 4345 - DNA, 17 bp, Artificial Sequence
  Synthetic primer
gctggcaggagaccccc

SEQ ID NO: 4346 - DNA, 19 bp, Artificial Sequence
  Synthetic primer
aatcccatgccagcaggtg

SEQ ID NO: 4347 - DNA, 19 bp, Artificial Sequence
  Synthetic primer
ggcctccatgccctgctta

SEQ ID NO: 4348 - DNA, 20 bp, Artificial Sequence
  Synthetic primer
taaacctttctatgttcctg

SEQ ID NO: 4349 - DNA, 19 bp, Artificial Sequence
  Synthetic primer
ctgggacagggtatgatcc

SEQ ID NO: 4350 - DNA, 20 bp, Artificial Sequence
  Synthetic primer
gtgacccttccaccatcaac

SEQ ID NO: 4351 - DNA, 19 bp, Artificial Sequence
  Synthetic primer
tgctttggggcagactgac

SEQ ID NO: 4352 - DNA, 17 bp, Artificial Sequence
  Synthetic primer
aagccttcctatcccca

SEQ ID NO: 4353 - DNA, 22 bp, Artificial Sequence
  Synthetic primer
tggttttcgaataagtagccac

SEQ ID NO: 4354 - DNA, 17 bp, Artificial Sequence
  Synthetic primer
atccagatggccctgac

SEQ ID NO: 4355 - DNA, 18 bp, Artificial Sequence
  Synthetic primer
tccacaccacgctgcctc

SEQ ID NO: 4356 - DNA, 19 bp, Artificial Sequence
  Synthetic primer
aggccagagaaagaggcga

SEQ ID NO: 4357 - DNA, 18 bp, Artificial Sequence
  Synthetic primer
cccctcaagagccccatc

SEQ ID NO: 4358 - DNA, 17 bp, Artificial Sequence
  Synthetic primer
accactgccgctgcccc

SEQ ID NO: 4359 - DNA, 20 bp, Artificial Sequence
  Synthetic primer
cagggtttgttctctgtctc

SEQ ID NO: 4360 - DNA, 22 bp, Artificial Sequence
  Synthetic primer
ccatcacagcttcaaaatcaca

SEQ ID NO: 4361 - DNA, 22 bp, Artificial Sequence
  Synthetic primer
aaattccttaacctctgtgaac

SEQ ID NO: 4362 - DNA, 17 bp, Artificial Sequence
  Synthetic primer
ctcccctggggcttccc

SEQ ID NO: 4363 - DNA, 21 bp, Artificial Sequence
  Synthetic primer
gggcaggtccaatgaaaatca

SEQ ID NO: 4364 - DNA, 20 bp, Artificial Sequence
  Synthetic primer
aggaccccacattgtggtaa

SEQ ID NO: 4365 - DNA, 17 bp, Artificial Sequence
  Synthetic primer
tctacctccacttccaa

SEQ ID NO: 4366 - DNA, 19 bp, Artificial Sequence
  Synthetic primer
agccaggataatctcctca

SEQ ID NO: 4367 - DNA, 20 bp, Artificial Sequence
  Synthetic primer
cttacccccaaagatgtcca

SEQ ID NO: 4368 - DNA, 20 bp, Artificial Sequence
  Synthetic primer
gaggctaggaccaaaggaac

SEQ ID NO: 4369 - DNA, 18 bp, Artificial Sequence
  Synthetic primer
ctcaggaggctgaggtgg

SEQ ID NO: 4370 - DNA, 21 bp, Artificial Sequence
  Synthetic primer
catttaccactcacagggtat

SEQ ID NO: 4371 - DNA, 20 bp, Artificial Sequence
  Synthetic primer
ttgtcacttcctcatgcctc

SEQ ID NO: 4372 - DNA, 20 bp, Artificial Sequence
  Synthetic primer
cttgtcacttcctcatgcct

SEQ ID NO: 4373 - DNA, 21 bp, Artificial Sequence
  Synthetic primer
ccagtctagttttcgatcacc

SEQ ID NO: 4374 - DNA, 20 bp, Artificial Sequence
  Synthetic primer
caacgtaggatgtggtgatc

SEQ ID NO: 4375 - DNA, 24 bp, Artificial Sequence
  Synthetic primer
ccatattttcaacatacatacata

SEQ ID NO: 4376 - DNA, 17 bp, Artificial Sequence
  Synthetic primer
accagctctctttggat

SEQ ID NO: 4377 - DNA, 17 bp, Artificial Sequence
  Synthetic primer
aacctggttctgccatt

SEQ ID NO: 4378 - DNA, 20 bp, Artificial Sequence
  Synthetic primer
ggcaactccttccacaatgg

SEQ ID NO: 4379 - DNA, 18 bp, Artificial Sequence
  Synthetic primer
ctgaagcagctgggagcc

SEQ ID NO: 4380 - DNA, 21 bp, Artificial Sequence
  Synthetic primer
ctgtcagatgccacacatcaa

SEQ ID NO: 4381 - DNA, 24 bp, Artificial Sequence
  Synthetic primer
agatggataaatagataaatggat

SEQ ID NO: 4382 - DNA, 18 bp, Artificial Sequence
  Synthetic primer
tgactgcagtgggctgcc

SEQ ID NO: 4383 - DNA, 21 bp, Artificial Sequence
  Synthetic primer
ttttgggtgtctggaataacg

SEQ ID NO: 4384 - DNA, 18 bp, Artificial Sequence
  Synthetic primer
ggctgcctgcccagatcc

SEQ ID NO: 4385 - DNA, 20 bp, Artificial Sequence
  Synthetic primer
gacaccaaaacccagtgcct

SEQ ID NO: 4386 - DNA, 21 bp, Artificial Sequence
  Synthetic primer
atatgctcacagttcaggcaa

SEQ ID NO: 4387 - DNA, 19 bp, Artificial Sequence
  Synthetic primer
tgcctggacaaggcccata

SEQ ID NO: 4388 - DNA, 21 bp, Artificial Sequence
  Synthetic primer
gaagcccatcgctaagtgttt

SEQ ID NO: 4389 - DNA, 19 bp, Artificial Sequence
  Synthetic primer
ggtgacacgttgggcttgt

SEQ ID NO: 4390 - DNA, 22 bp, Artificial Sequence
  Synthetic primer
caaaggtagttgaatctgattc

SEQ ID NO: 4391 - DNA, 21 bp, Artificial Sequence
  Synthetic primer
tgtttgtgtgtgtgtgtgtgt

SEQ ID NO: 4392 - DNA, 20 bp, Artificial Sequence
  Synthetic primer
gtgtgtgtgtgtctgtgtgt

SEQ ID NO: 4393 - DNA, 21 bp, Artificial Sequence
  Synthetic primer
acacacacacacaaacacaca

SEQ ID NO: 4394 - DNA, 18 bp, Artificial Sequence
  Synthetic primer
aggctgggcacagtggct

SEQ ID NO: 4395 - DNA, 19 bp, Artificial Sequence
  Synthetic primer
agatcaccgcaacctctgc

SEQ ID NO: 4396 - DNA, 21 bp, Artificial Sequence
  Synthetic primer
ggcaacaagagtgaaactcta

SEQ ID NO: 4397 - DNA, 19 bp, Artificial Sequence
  Synthetic primer
tcttgctctgtcacccagg

SEQ ID NO: 4398 - DNA, 19 bp, Artificial Sequence
  Synthetic primer
tcttgctctgtcacccagg

SEQ ID NO: 4399 - DNA, 17 bp, Artificial Sequence
  Synthetic primer
tctctctaatggggacc

SEQ ID NO: 4400 - DNA, 17 bp, Artificial Sequence
  Synthetic primer
actggatcccagaagag

SEQ ID NO: 4401 - DNA, 20 bp, Artificial Sequence
  Synthetic primer
ggaggccaaggagtttcaag

SEQ ID NO: 4402 - DNA, 17 bp, Artificial Sequence
  Synthetic primer
ttcccctcagctcttag

SEQ ID NO: 4403 - DNA, 20 bp, Artificial Sequence
  Synthetic primer
tagccatccttcctcagatg

SEQ ID NO: 4404 - DNA, 17 bp, Artificial Sequence
  Synthetic primer
tccttttttccccaccc

SEQ ID NO: 4405 - DNA, 19 bp, Artificial Sequence
  Synthetic primer
gctcctggagggcttccaa

SEQ ID NO: 4406 - DNA, 18 bp, Artificial Sequence
  Synthetic primer
ccctctccagggccatgc

SEQ ID NO: 4407 - DNA, 22 bp, Artificial Sequence
  Synthetic primer
cttgggcaaactccttaaaata

SEQ ID NO: 4408 - DNA, 17 bp, Artificial Sequence
  Synthetic primer
aacaaccaactctccag

SEQ ID NO: 4409 - DNA, 20 bp, Artificial Sequence
  Synthetic primer
cagcagaaccgaggtgaaat

SEQ ID NO: 4410 - DNA, 20 bp, Artificial Sequence
  Synthetic primer
cattttcagggatgcctcct

SEQ ID NO: 4411 - DNA, 19 bp, Artificial Sequence
  Synthetic primer
gcacaaagcagcagggaac

SEQ ID NO: 4412 - DNA, 20 bp, Artificial Sequence
  Synthetic primer
acagacactcccacatcatc

SEQ ID NO: 4413 - DNA, 20 bp, Artificial Sequence
  Synthetic primer
ccgacttctcactctttctg

SEQ ID NO: 4414 - DNA, 18 bp, Artificial Sequence
  Synthetic primer
caggcctccccatgcact

SEQ ID NO: 4415 - DNA, 21 bp, Artificial Sequence
  Synthetic primer
aaataaccccaagaagcagac

SEQ ID NO: 4416 - DNA, 20 bp, Artificial Sequence
  Synthetic primer
ctccaactcagaacatgctc

SEQ ID NO: 4417 - DNA, 23 bp, Artificial Sequence
  Synthetic primer
catgaatgtgattcacattctcc

SEQ ID NO: 4418 - DNA, 19 bp, Artificial Sequence
  Synthetic primer
ggaagagacgggcggagaa

SEQ ID NO: 4419 - DNA, 20 bp, Artificial Sequence
  Synthetic primer
cgtcagcaaatgtgtaccga

SEQ ID NO: 4420 - DNA, 20 bp, Artificial Sequence
  Synthetic primer
cattgagatgggaagggcaa

SEQ ID NO: 4421 - DNA, 19 bp, Artificial Sequence
  Synthetic primer
tttttcccatccccacccc

SEQ ID NO: 4422 - DNA, 21 bp, Artificial Sequence
  Synthetic primer
gtgtcagcagaaaaagtgtac

SEQ ID NO: 4423 - DNA, 18 bp, Artificial Sequence
  Synthetic primer
catagggataggaatggg

SEQ ID NO: 4424 - DNA, 17 bp, Artificial Sequence
  Synthetic primer
tcccagaatttggagcc

SEQ ID NO: 4425 - DNA, 18 bp, Artificial Sequence
  Synthetic primer
caaaaggatctgcaaaag

SEQ ID NO: 4426 - DNA, 19 bp, Artificial Sequence
  Synthetic primer
tagtgagcaggggagccta

SEQ ID NO: 4427 - DNA, 17 bp, Artificial Sequence
  Synthetic primer
gctgaccccaggcaggg

SEQ ID NO: 4428 - DNA, 18 bp, Artificial Sequence
  Synthetic primer
ctggggctcgagcacaga

SEQ ID NO: 4429 - DNA, 19 bp, Artificial Sequence
  Synthetic primer
ggtgtcagcaaccacaccc

SEQ ID NO: 4430 - DNA, 19 bp, Artificial Sequence
  Synthetic primer
gcacctgccatcatgacca

SEQ ID NO: 4431 - DNA, 19 bp, Artificial Sequence
  Synthetic primer
ctgccttcccggttaagca

SEQ ID NO: 4432 - DNA, 19 bp, Artificial Sequence
  Synthetic primer
gttgcagtgagccgagatc

SEQ ID NO: 4433 - DNA, 23 bp, Artificial Sequence
  Synthetic primer
tgttgttttaagctactgagttt

SEQ ID NO: 4434 - DNA, 22 bp, Artificial Sequence
  Synthetic primer
agggtgtgtaatgtaacatttc

SEQ ID NO: 4435 - DNA, 18 bp, Artificial Sequence
  Synthetic primer
gccctgcactcccaccct

SEQ ID NO: 4436 - DNA, 19 bp, Artificial Sequence
  Synthetic primer
tcccacccttgtacactgc

SEQ ID NO: 4437 - DNA, 19 bp, Artificial Sequence
  Synthetic primer
ctctgactgaggagagacc

SEQ ID NO: 4438 - DNA, 18 bp, Artificial Sequence
  Synthetic primer
ccgtggaggacccctgga

SEQ ID NO: 4439 - DNA, 19 bp, Artificial Sequence
  Synthetic primer
gacctcaggtgatccaccc

SEQ ID NO: 4440 - DNA, 19 bp, Artificial Sequence
  Synthetic primer
gccaaggtgggcagatcac

SEQ ID NO: 4441 - DNA, 19 bp, Artificial Sequence
  Synthetic primer
gaaaccagcctggccaaca

SEQ ID NO: 4442 - DNA, 21 bp, Artificial Sequence
  Synthetic primer
gggaaacacagaaagacccta

SEQ ID NO: 4443 - DNA, 20 bp, Artificial Sequence
  Synthetic primer
atgggtgtgaacggtagctt

SEQ ID NO: 4444 - DNA, 21 bp, Artificial Sequence
  Synthetic primer
gccattttaatgggtgtgaac

SEQ ID NO: 4445 - DNA, 20 bp, Artificial Sequence
  Synthetic primer
gtggctgtgcttttggttgc

SEQ ID NO: 4446 - DNA, 22 bp, Artificial Sequence
  Synthetic primer
gctgctaatgtacacaacaatg

SEQ ID NO: 4447 - DNA, 20 bp, Artificial Sequence
  Synthetic primer
gagatggggttttcccatgt

SEQ ID NO: 4448 - DNA, 24 bp, Artificial Sequence
  Synthetic primer
ttcaataaaatgtactcattcaaa

SEQ ID NO: 4449 - DNA, 20 bp, Artificial Sequence
  Synthetic primer
gaccaggagttcaagaccag

SEQ ID NO: 4450 - DNA, 20 bp, Artificial Sequence
  Synthetic primer
gaccagcctggacaacatga

SEQ ID NO: 4451 - DNA, 19 bp, Artificial Sequence
  Synthetic primer
tcactgcaacctctgcgtc

SEQ ID NO: 4452 - DNA, 18 bp, Artificial Sequence
  Synthetic primer
gtgtgcatgccaccacgc

SEQ ID NO: 4453 - DNA, 19 bp, Artificial Sequence
  Synthetic primer
tgtgacctcagctcactgc

SEQ ID NO: 4454 - DNA, 22 bp, Artificial Sequence
  Synthetic primer
agatgtgtagatgacttacact

SEQ ID NO: 4455 - DNA, 22 bp, Artificial Sequence
  Synthetic primer
agatgtgtagatgacttacact

SEQ ID NO: 4456 - DNA, 21 bp, Artificial Sequence
  Synthetic primer
cgagagctcatctccactaaa

SEQ ID NO: 4457 - DNA, 24 bp, Artificial Sequence
  Synthetic primer
gtgcctggctaattaaaaaaaaaa

SEQ ID NO: 4458 - DNA, 25 bp, Artificial Sequence
  Synthetic primer
ctcatctccactaaatttttttttt

SEQ ID NO: 4459 - DNA, 19 bp, Artificial Sequence
  Synthetic primer
ccaccttggcctcccaaag

SEQ ID NO: 4460 - DNA, 19 bp, Artificial Sequence
  Synthetic primer
agcactttgggaggccaag

SEQ ID NO: 4461 - DNA, 18 bp, Artificial Sequence
  Synthetic primer
gcatgtgctaccacgccc

SEQ ID NO: 4462 - DNA, 20 bp, Artificial Sequence
  Synthetic primer
ccaggttcaagtgatcctcc

SEQ ID NO: 4463 - DNA, 23 bp, Artificial Sequence
  Synthetic primer
tgccctgttctgcacctttaaaa

SEQ ID NO: 4464 - DNA, 20 bp, Artificial Sequence
  Synthetic primer
ccctgttctgcacctttaaa

SEQ ID NO: 4465 - DNA, 23 bp, Artificial Sequence
  Synthetic primer
agggagaaaaaaataaaaggaca

SEQ ID NO: 4466 - DNA, 19 bp, Artificial Sequence
  Synthetic primer
gggagtgggaggaagccaa

SEQ ID NO: 4467 - DNA, 20 bp, Artificial Sequence
  Synthetic primer
aggaaaggaatgtctgcccc

SEQ ID NO: 4468 - DNA, 21 bp, Artificial Sequence
  Synthetic primer
atgtgggtttggactggggct

SEQ ID NO: 4469 - DNA, 26 bp, Artificial Sequence
  Synthetic primer
cgttttctttttcttttttttttttt

SEQ ID NO: 4470 - DNA, 19 bp, Artificial Sequence
  Synthetic primer
gctgaagtaggcggatcac

SEQ ID NO: 4471 - DNA, 20 bp, Artificial Sequence
  Synthetic primer
ctctctcacagagcacactc

SEQ ID NO: 4472 - DNA, 20 bp, Artificial Sequence
  Synthetic primer
gacatgcatcaaagcagctg

SEQ ID NO: 4473 - DNA, 20 bp, Artificial Sequence
  Synthetic primer
ccttttcgctgaaaagaggg

SEQ ID NO: 4474 - DNA, 20 bp, Artificial Sequence
  Synthetic primer
ggaagaagccctcttttcag

SEQ ID NO: 4475 - DNA, 25 bp, Artificial Sequence
  Synthetic primer
actccatctcaaaaaaaaaaaaaaa

SEQ ID NO: 4476 - DNA, 21 bp, Artificial Sequence
  Synthetic primer
caaaccactgtataagtccag

SEQ ID NO: 4477 - DNA, 19 bp, Artificial Sequence
  Synthetic primer
ctcagcctcctgagatgct

SEQ ID NO: 4478 - DNA, 20 bp, Artificial Sequence
  Synthetic primer
catgctacaagcaaccttgg

SEQ ID NO: 4479 - DNA, 20 bp, Artificial Sequence
  Synthetic primer
aacagtggttgagtacctgc

SEQ ID NO: 4480 - DNA, 20 bp, Artificial Sequence
  Synthetic primer
catgaccctgtacccagcat

SEQ ID NO: 4481 - DNA, 21 bp, Artificial Sequence
  Synthetic primer
tctatgaacctgttgaaggca

SEQ ID NO: 4482 - DNA, 20 bp, Artificial Sequence
  Synthetic primer
cttctcctccccatagctct

SEQ ID NO: 4483 - DNA, 18 bp, Artificial Sequence
  Synthetic primer
tgtctccagggtctgggg

SEQ ID NO: 4484 - DNA, 21 bp, Artificial Sequence
  Synthetic primer
cagcaatctatgcacagagaa

SEQ ID NO: 4485 - DNA, 21 bp, Artificial Sequence
  Synthetic primer
caaaggctgagaaagactgaa

SEQ ID NO: 4486 - DNA, 22 bp, Artificial Sequence
  Synthetic primer
aaatttaaccatcatctgccag

SEQ ID NO: 4487 - DNA, 20 bp, Artificial Sequence
  Synthetic primer
ggtcaacatggtgaaacccc

SEQ ID NO: 4488 - DNA, 20 bp, Artificial Sequence
  Synthetic primer
aaaataagcctggcgcacct

SEQ ID NO: 4489 - DNA, 19 bp, Artificial Sequence
  Synthetic primer
cagggccagccatgaacgt

SEQ ID NO: 4490 - DNA, 20 bp, Artificial Sequence
  Synthetic primer
ggatcatccaagtatgctcc

SEQ ID NO: 4491 - DNA, 17 bp, Artificial Sequence
  Synthetic primer
tcttggctcagtgctgc

SEQ ID NO: 4492 - DNA, 21 bp, Artificial Sequence
  Synthetic primer
gagcaatgaacaccaatatcc

SEQ ID NO: 4493 - DNA, 20 bp, Artificial Sequence
  Synthetic primer
ctgaagcaggaggatcgctt

SEQ ID NO: 4494 - DNA, 19 bp, Artificial Sequence
  Synthetic primer
cgcttgagcccaggagttc

SEQ ID NO: 4495 - DNA, 21 bp, Artificial Sequence
  Synthetic primer
catttgccctatctgtagttc

SEQ ID NO: 4496 - DNA, 18 bp, Artificial Sequence
  Synthetic primer
catctccccgaggcaccc

SEQ ID NO: 4497 - DNA, 20 bp, Artificial Sequence
  Synthetic primer
tccagtgatatgcttccctc

SEQ ID NO: 4498 - DNA, 19 bp, Artificial Sequence
  Synthetic primer
gaacctgggaggtggaggt

SEQ ID NO: 4499 - DNA, 19 bp, Artificial Sequence
  Synthetic primer
tgttggccagactggtctc

SEQ ID NO: 4500 - DNA, 20 bp, Artificial Sequence
  Synthetic primer
gggatcagtaaacctttccc

SEQ ID NO: 4501 - DNA, 19 bp, Artificial Sequence
  Synthetic primer
cttcatgaaggccgcagac

SEQ ID NO: 4502 - DNA, 19 bp, Artificial Sequence
  Synthetic primer
ctcgactcatggcaacctc

SEQ ID NO: 4503 - DNA, 19 bp, Artificial Sequence
  Synthetic primer
ctgggcaacagagtgagac

SEQ ID NO: 4504 - DNA, 20 bp, Artificial Sequence
  Synthetic primer
cttccctgacccccaaacaa

SEQ ID NO: 4505 - DNA, 20 bp, Artificial Sequence
  Synthetic primer
cttccctgacccccaaacaa

SEQ ID NO: 4506 - DNA, 22 bp, Artificial Sequence
  Synthetic primer
acctcaaaacctgactatagaa

SEQ ID NO: 4507 - DNA, 24 bp, Artificial Sequence
  Synthetic primer
ctcatcaaaagtaaaatgggaaaa

SEQ ID NO: 4508 - DNA, 24 bp, Artificial Sequence
  Synthetic primer
tttttgttcattggctaatttctt

SEQ ID NO: 4509 - DNA, 26 bp, Artificial Sequence
  Synthetic primer
ccttaatcatgtttatttatttattt

SEQ ID NO: 4510 - DNA, 20 bp, Artificial Sequence
  Synthetic primer
ttaaggataaagcaatccag

SEQ ID NO: 4511 - DNA, 22 bp, Artificial Sequence
  Synthetic primer
tcttggagccatattttatttg

SEQ ID NO: 4512 - DNA, 18 bp, Artificial Sequence
  Synthetic primer
gacagaggagagctcccc

SEQ ID NO: 4513 - DNA, 21 bp, Artificial Sequence
  Synthetic primer
agcccagtagtaaggaaagaa

SEQ ID NO: 4514 - DNA, 20 bp, Artificial Sequence
  Synthetic primer
cagagtgagactccgtctca

SEQ ID NO: 4515 - DNA, 20 bp, Artificial Sequence
  Synthetic primer
atgttagccaggatggtctc

SEQ ID NO: 4516 - DNA, 20 bp, Artificial Sequence
  Synthetic primer
gattatgagccactgcaccc

SEQ ID NO: 4517 - DNA, 20 bp, Artificial Sequence
  Synthetic primer
gcccatcttcttgggtgtgt

SEQ ID NO: 4518 - DNA, 19 bp, Artificial Sequence
  Synthetic primer
ctgcctcctgggttcaagc

SEQ ID NO: 4519 - DNA, 21 bp, Artificial Sequence
  Synthetic primer
gtgtgacaagccaatattccc

SEQ ID NO: 4520 - DNA, 19 bp, Artificial Sequence
  Synthetic primer
ccacaccattaccaggcca

SEQ ID NO: 4521 - DNA, 19 bp, Artificial Sequence
  Synthetic primer
ccactgtgcccagcctaaa

SEQ ID NO: 4522 - DNA, 18 bp, Artificial Sequence
  Synthetic primer
gctgggcacagtggctca

SEQ ID NO: 4523 - DNA, 20 bp, Artificial Sequence
  Synthetic primer
agatcataccactgcactcc

SEQ ID NO: 4524 - DNA, 19 bp, Artificial Sequence
  Synthetic primer
gtgcgcacacacacacaca

SEQ ID NO: 4525 - DNA, 19 bp, Artificial Sequence
  Synthetic primer
catgtgtgtgtgtgtgcgc

SEQ ID NO: 4526 - DNA, 19 bp, Artificial Sequence
  Synthetic primer
cccggcattctctagcacc

SEQ ID NO: 4527 - DNA, 19 bp, Artificial Sequence
  Synthetic primer
gggacgttcaaaggggagc

SEQ ID NO: 4528 - DNA, 23 bp, Artificial Sequence
  Synthetic primer
gtacaatgtacaaaatgtccact

SEQ ID NO: 4529 - DNA, 18 bp, Artificial Sequence
  Synthetic primer
cccacagactcctacggg

SEQ ID NO: 4530 - DNA, 20 bp, Artificial Sequence
  Synthetic primer
tgttgactgccttacacacc

SEQ ID NO: 4531 - DNA, 23 bp, Artificial Sequence
  Synthetic primer
ttaccctacagctgatttttttt

SEQ ID NO: 4532 - DNA, 20 bp, Artificial Sequence
  Synthetic primer
ccttgcgtgtgtgtgtgtgt

SEQ ID NO: 4533 - DNA, 20 bp, Artificial Sequence
  Synthetic primer
tatgcctcagcaagcatgca

SEQ ID NO: 4534 - DNA, 22 bp, Artificial Sequence
  Synthetic primer
tgctgattgtaaacaatgcaca

SEQ ID NO: 4535 - DNA, 23 bp, Artificial Sequence
  Synthetic primer
ctgctcttgactagtcttaaaaa

SEQ ID NO: 4536 - DNA, 19 bp, Artificial Sequence
  Synthetic primer
ctctgtcactgactggccc

SEQ ID NO: 4537 - DNA, 22 bp, Artificial Sequence
  Synthetic primer
agaagaagcattggtctgttta

SEQ ID NO: 4538 - DNA, 20 bp, Artificial Sequence
  Synthetic primer
cactcatgcctcaagccaat

SEQ ID NO: 4539 - DNA, 20 bp, Artificial Sequence
  Synthetic primer
tgaggcatgagtgatcagca

SEQ ID NO: 4540 - DNA, 21 bp, Artificial Sequence
  Synthetic primer
acctaagtttcctgacattcc

SEQ ID NO: 4541 - DNA, 20 bp, Artificial Sequence
  Synthetic primer
tacaattcacccagctcctc

SEQ ID NO: 4542 - DNA, 19 bp, Artificial Sequence
  Synthetic primer
ccatctgcctgtcctcctg

SEQ ID NO: 4543 - DNA, 22 bp, Artificial Sequence
  Synthetic primer
caagagctggagtgatttgttt

SEQ ID NO: 4544 - DNA, 21 bp, Artificial Sequence
  Synthetic primer
acatgctaggaagtaggcaat

SEQ ID NO: 4545 - DNA, 25 bp, Artificial Sequence
  Synthetic primer
cacctgggttttttttttttttttt

SEQ ID NO: 4546 - DNA, 23 bp, Artificial Sequence
  Synthetic primer
ttgaacatgcaaagtatttctga

SEQ ID NO: 4547 - DNA, 17 bp, Artificial Sequence
  Synthetic primer
gcttcctcccccccccc

SEQ ID NO: 4548 - DNA, 25 bp, Artificial Sequence
  Synthetic primer
caccatttctgtttttttttttttt

SEQ ID NO: 4549 - DNA, 17 bp, Artificial Sequence
  Synthetic primer
ttggtcaacatcgcagc

SEQ ID NO: 4550 - DNA, 19 bp, Artificial Sequence
  Synthetic primer
acaaacctccacctcctgg

SEQ ID NO: 4551 - DNA, 22 bp, Artificial Sequence
  Synthetic primer
catgtcacagttctgaatagag

SEQ ID NO: 4552 - DNA, 20 bp, Artificial Sequence
  Synthetic primer
gagctaggggtctgaattag

SEQ ID NO: 4553 - DNA, 20 bp, Artificial Sequence
  Synthetic primer
acttaaggagagctaggggt

SEQ ID NO: 4554 - DNA, 24 bp, Artificial Sequence
  Synthetic primer
ctttctttctttctctttctttct

SEQ ID NO: 4555 - DNA, 19 bp, Artificial Sequence
  Synthetic primer
ggagctcagtggcacacga

SEQ ID NO: 4556 - DNA, 20 bp, Artificial Sequence
  Synthetic primer
gagcaagtggaagatgagac

SEQ ID NO: 4557 - DNA, 20 bp, Artificial Sequence
  Synthetic primer
cgatgtgtagaaaagggcac

SEQ ID NO: 4558 - DNA, 18 bp, Artificial Sequence
  Synthetic primer
ggaggccgacactgacca

SEQ ID NO: 4559 - DNA, 22 bp, Artificial Sequence
  Synthetic primer
ttatacttttgatggctcctac

SEQ ID NO: 4560 - DNA, 20 bp, Artificial Sequence
  Synthetic primer
tcctgaccattctactgcct

SEQ ID NO: 4561 - DNA, 19 bp, Artificial Sequence
  Synthetic primer
ggtcaggaggagagaggga

SEQ ID NO: 4562 - DNA, 21 bp, Artificial Sequence
  Synthetic primer
ggcaaggacataaagcttcat

SEQ ID NO: 4563 - DNA, 19 bp, Artificial Sequence
  Synthetic primer
gcctggagatttcgtggtc

SEQ ID NO: 4564 - DNA, 19 bp, Artificial Sequence
  Synthetic primer
gggtacctgggagtcagac

SEQ ID NO: 4565 - DNA, 20 bp, Artificial Sequence
  Synthetic primer
cttgggcatcctagtagaga

SEQ ID NO: 4566 - DNA, 21 bp, Artificial Sequence
  Synthetic primer
cggattttcatgtcctggaaa

SEQ ID NO: 4567 - DNA, 20 bp, Artificial Sequence
  Synthetic primer
ctcctgccatgattctgagg

SEQ ID NO: 4568 - DNA, 20 bp, Artificial Sequence
  Synthetic primer
gatttcagacctacctgggc

SEQ ID NO: 4569 - DNA, 18 bp, Artificial Sequence
  Synthetic primer
gtacagcctccctcctgc

SEQ ID NO: 4570 - DNA, 20 bp, Artificial Sequence
  Synthetic primer
gcctggaaaagctgcagaga

SEQ ID NO: 4571 - DNA, 19 bp, Artificial Sequence
  Synthetic primer
accccatcaacaagtgggc

SEQ ID NO: 4572 - DNA, 21 bp, Artificial Sequence
  Synthetic primer
accatctcacaccagttagaa

SEQ ID NO: 4573 - DNA, 21 bp, Artificial Sequence
  Synthetic primer
atgttttagcgaagagactgg

SEQ ID NO: 4574 - DNA, 21 bp, Artificial Sequence
  Synthetic primer
attttctcttgctgctgccat

SEQ ID NO: 4575 - DNA, 19 bp, Artificial Sequence
  Synthetic primer
gtgaggacacagccaaacc

SEQ ID NO: 4576 - DNA, 19 bp, Artificial Sequence
  Synthetic primer
ggaaggaagtggccagcac

SEQ ID NO: 4577 - DNA, 22 bp, Artificial Sequence
  Synthetic primer
ctcatttttcccttctgttcac

SEQ ID NO: 4578 - DNA, 20 bp, Artificial Sequence
  Synthetic primer
cctgagagaagctgcttcac

SEQ ID NO: 4579 - DNA, 20 bp, Artificial Sequence
  Synthetic primer
aagcactgaaggggcacaaa

SEQ ID NO: 4580 - DNA, 22 bp, Artificial Sequence
  Synthetic primer
atagagataccagcgtatcatt

SEQ ID NO: 4581 - DNA, 23 bp, Artificial Sequence
  Synthetic primer
ttagctttatttatactggagga

SEQ ID NO: 4582 - DNA, 24 bp, Artificial Sequence
  Synthetic primer
gattccatctccaaaaaaaaaaaa

SEQ ID NO: 4583 - DNA, 20 bp, Artificial Sequence
  Synthetic primer
actctccaaggcaactcact

SEQ ID NO: 4584 - DNA, 20 bp, Artificial Sequence
  Synthetic primer
ccaacgtcacagtcctaagt

SEQ ID NO: 4585 - DNA, 17 bp, Artificial Sequence
  Synthetic primer
gcaccgcgttgccgccc

SEQ ID NO: 4586 - DNA, 20 bp, Artificial Sequence
  Synthetic primer
tgccctgccaaaaaacaagg

SEQ ID NO: 4587 - DNA, 19 bp, Artificial Sequence
  Synthetic primer
cccaggctggagtgcagta

SEQ ID NO: 4588 - DNA, 19 bp, Artificial Sequence
  Synthetic primer
ggctggcaaccaagacatg

SEQ ID NO: 4589 - DNA, 20 bp, Artificial Sequence
  Synthetic primer
ggtggcttacgcctgtaatc

SEQ ID NO: 4590 - DNA, 20 bp, Artificial Sequence
  Synthetic primer
attacaggcatgagcctagc

SEQ ID NO: 4591 - DNA, 21 bp, Artificial Sequence
  Synthetic primer
cggagagaaactttgtatgca

SEQ ID NO: 4592 - DNA, 22 bp, Artificial Sequence
  Synthetic primer
aatggctaaaatggtacactgt

SEQ ID NO: 4593 - DNA, 21 bp, Artificial Sequence
  Synthetic primer
gtgatctgggacacagaactt

SEQ ID NO: 4594 - DNA, 20 bp, Artificial Sequence
  Synthetic primer
ctggcacatgtctaatcccc

SEQ ID NO: 4595 - DNA, 20 bp, Artificial Sequence
  Synthetic primer
tccggttactggtgtttcac

SEQ ID NO: 4596 - DNA, 19 bp, Artificial Sequence
  Synthetic primer
ggggagagatgaggtgttg

SEQ ID NO: 4597 - DNA, 19 bp, Artificial Sequence
  Synthetic primer
caggaatgtgacccccacc

SEQ ID NO: 4598 - DNA, 23 bp, Artificial Sequence
  Synthetic primer
aacaccctgtctcaaaaaataat

SEQ ID NO: 4599 - DNA, 22 bp, Artificial Sequence
  Synthetic primer
cattatgtttcccaggtatgca

SEQ ID NO: 4600 - DNA, 20 bp, Artificial Sequence
  Synthetic primer
tctctaagcttgtgttcccc

SEQ ID NO: 4601 - DNA, 21 bp, Artificial Sequence
  Synthetic primer
taccgaacccacaactgattt

SEQ ID NO: 4602 - DNA, 19 bp, Artificial Sequence
  Synthetic primer
ggcggcttaacagttccac

SEQ ID NO: 4603 - DNA, 19 bp, Artificial Sequence
  Synthetic primer
tacacgagcagacacacgc

SEQ ID NO: 4604 - DNA, 18 bp, Artificial Sequence
  Synthetic primer
gagcgccctgcaaactcc

SEQ ID NO: 4605 - DNA, 18 bp, Artificial Sequence
  Synthetic primer
cccgtcgcttcccctgag

SEQ ID NO: 4606 - DNA, 19 bp, Artificial Sequence
  Synthetic primer
ctctgggctttgacagctc

SEQ ID NO: 4607 - DNA, 19 bp, Artificial Sequence
  Synthetic primer
gaaaaggagctaccagcgc

SEQ ID NO: 4608 - DNA, 19 bp, Artificial Sequence
  Synthetic primer
tggaaggctgccgtttcgt

SEQ ID NO: 4609 - DNA, 30 bp, Artificial Sequence
  Synthetic primer
acgttggatgagcgagaacttatctctacc

SEQ ID NO: 4610 - DNA, 30 bp, Artificial Sequence
  Synthetic primer
acgttggatgatcttctgactagctgggac

SEQ ID NO: 4611 - DNA, 30 bp, Artificial Sequence
  Synthetic primer
acgttggatggtgatgccagatacttcccg

SEQ ID NO: 4612 - DNA, 30 bp, Artificial Sequence
  Synthetic primer
acgttggatgagcactgtgggtcactgtgg

SEQ ID NO: 4613 - DNA, 30 bp, Artificial Sequence
  Synthetic primer
acgttggatgcattgtgcctcagtttcctc

SEQ ID NO: 4614 - DNA, 30 bp, Artificial Sequence
  Synthetic primer
acgttggatgttatggagccctttccacag

SEQ ID NO: 4615 - DNA, 30 bp, Artificial Sequence
  Synthetic primer
acgttggatgagcattgtgcctcagtttcc

SEQ ID NO: 4616 - DNA, 30 bp, Artificial Sequence; identical to SEQ ID NO: 4614
  Synthetic primer

SEQ ID NO: 4617 - DNA, 30 bp, Artificial Sequence
  Synthetic primer
acgttggatgtgaaagcccttggcaggaga

SEQ ID NO: 4618 - DNA, 30 bp, Artificial Sequence
  Synthetic primer
acgttggatgagacactggacctaactgag

SEQ ID NO: 4619 - DNA, 30 bp, Artificial Sequence
  Synthetic primer
acgttggatgaccacctccccactattctg

SEQ ID NO: 4620 - DNA, 30 bp, Artificial Sequence
  Synthetic primer
acgttggatgaactctgaggttccaacctg

SEQ ID NO: 4621 - DNA, 30 bp, Artificial Sequence
  Synthetic primer
acgttggatgacaaaaggactcggatctgg

SEQ ID NO: 4622 - DNA, 30 bp, Artificial Sequence
  Synthetic primer
acgttggatgagctctaggggaatcctctc

SEQ ID NO: 4623 - DNA, 30 bp, Artificial Sequence
  Synthetic primer
acgttggatgctagatcattggccagtgtg

SEQ ID NO: 4624 - DNA, 30 bp, Artificial Sequence
  Synthetic primer
acgttggatgaagaggcatgccgaaatgag

SEQ ID NO: 4625 - DNA, 31 bp, Artificial Sequence
  Synthetic primer
acgttggatgtgacctgcacagcccgggaga

SEQ ID NO: 4626 - DNA, 30 bp, Artificial Sequence
  Synthetic primer
acgttggatgccaatgaaagaggagatgcg

SEQ ID NO: 4627 - DNA, 30 bp, Artificial Sequence
  Synthetic primer
acgttggatgggtggctagtaggatgattg

SEQ ID NO: 4628 - DNA, 30 bp, Artificial Sequence
  Synthetic primer
acgttggatggcatggaaccccacatgtac

SEQ ID NO: 4629 - DNA, 30 bp, Artificial Sequence
  Synthetic primer
acgttggatgtgatcaaggttccatcttag

SEQ ID NO: 4630 - DNA, 30 bp, Artificial Sequence
  Synthetic primer
acgttggatgtatccaccatcgttccaaac

SEQ ID NO: 4631 - DNA, 30 bp, Artificial Sequence
  Synthetic primer
acgttggatgcctggctcattgaagcattc

SEQ ID NO: 4632 - DNA, 30 bp, Artificial Sequence
  Synthetic primer
acgttggatggaagttcacatttccaaggg

SEQ ID NO: 4633 - DNA, 30 bp, Artificial Sequence
  Synthetic primer
acgttggatgtttcatgcttttgggaccag

SEQ ID NO: 4634 - DNA, 30 bp, Artificial Sequence
  Synthetic primer
acgttggatggatttccctatttaactggc

SEQ ID NO: 4635 - DNA, 30 bp, Artificial Sequence
  Synthetic primer
acgttggatgacttgagctcaggagtttga

SEQ ID NO: 4636 - DNA, 30 bp, Artificial Sequence
  Synthetic primer
acgttggatgtacaggtttgtgccaccatg

SEQ ID NO: 4637 - DNA, 30 bp, Artificial Sequence
  Synthetic primer
acgttggatgctatccttctaccaaaggat

SEQ ID NO: 4638 - DNA, 30 bp, Artificial Sequence
  Synthetic primer
acgttggatgtcagagtactagtcttgaac

SEQ ID NO: 4639 - DNA, 30 bp, Artificial Sequence
  Synthetic primer
acgttggatgaacaattcttctgacgctgc

SEQ ID NO: 4640 - DNA, 30 bp, Artificial Sequence
  Synthetic primer
acgttggatgggcatatactgtatggttcc

SEQ ID NO: 4641 - DNA, 30 bp, Artificial Sequence
  Synthetic primer
acgttggatgatccagtcctagttcctttc

SEQ ID NO: 4642 - DNA, 30 bp, Artificial Sequence
  Synthetic primer
acgttggatgagtctcttctggctgtttac

SEQ ID NO: 4643 - DNA, 30 bp, Artificial Sequence
  Synthetic primer
acgttggatgggagagatcgctggcttgat

SEQ ID NO: 4644 - DNA, 30 bp, Artificial Sequence
  Synthetic primer
acgttggatgttgcagtgagctgagattgc

SEQ ID NO: 4645 - DNA, 30 bp, Artificial Sequence
  Synthetic primer
acgttggatgcctctgtgttaagtctattc

SEQ ID NO: 4646 - DNA, 30 bp, Artificial Sequence
  Synthetic primer
acgttggatgtagcacatagctagatactg

SEQ ID NO: 4647 - DNA, 30 bp, Artificial Sequence
  Synthetic primer
acgttggatgaccttcactgagaacactgg

SEQ ID NO: 4648 - DNA, 30 bp, Artificial Sequence
  Synthetic primer
acgttggatgacctggccaatatgatgagg

SEQ ID NO: 4649 - DNA, 30 bp, Artificial Sequence
  Synthetic primer
acgttggatgtgacactgagcatcttttcc

SEQ ID NO: 4650 - DNA, 30 bp, Artificial Sequence
  Synthetic primer
acgttggatggaatagacacttcaccagag

SEQ ID NO: 4651 - DNA, 30 bp, Artificial Sequence
  Synthetic primer
acgttggatgtagtcctagctacacgggag

SEQ ID NO: 4652 - DNA, 30 bp, Artificial Sequence
  Synthetic primer
acgttggatgagtgcagtggcacgatcttg

SEQ ID NO: 4653 - DNA, 30 bp, Artificial Sequence
  Synthetic primer
acgttggatgaaatgctgggattacaggcg

SEQ ID NO: 4654 - DNA, 30 bp, Artificial Sequence
  Synthetic primer
acgttggatgctgggtataaacccaaaggg

SEQ ID NO: 4655 - DNA, 30 bp, Artificial Sequence
  Synthetic primer
acgttggatggggaatcacagaaagtgtcc

SEQ ID NO: 4656 - DNA, 30 bp, Artificial Sequence
  Synthetic primer
acgttggatgcacacgtggtcataatgtgc

SEQ ID NO: 4657 - DNA, 30 bp, Artificial Sequence
  Synthetic primer
acgttggatgccggccctttctcatttttg

SEQ ID NO: 4658 - DNA, 30 bp, Artificial Sequence
  Synthetic primer
acgttggatgatgaacccaaaacctggttc

SEQ ID NO: 4659 - DNA, 30 bp, Artificial Sequence
  Synthetic primer
acgttggatgcagagtggctgtcaatgaaa

SEQ ID NO: 4660 - DNA, 30 bp, Artificial Sequence
  Synthetic primer
acgttggatgcctgatcaatctgtatagag

SEQ ID NO: 4661 - DNA, 30 bp, Artificial Sequence
  Synthetic primer
acgttggatgaagaaccaggttttgggttc

SEQ ID NO: 4662 - DNA, 30 bp, Artificial Sequence
  Synthetic primer
acgttggatgaaaaaagaccagagtggctg

SEQ ID NO: 4663 - DNA, 30 bp, Artificial Sequence; identical to SEQ ID NO: 4661
  Synthetic primer

SEQ ID NO: 4664 - DNA, 30 bp, Artificial Sequence; identical to SEQ ID NO: 4659
  Synthetic primer

SEQ ID NO: 4665 - DNA, 30 bp, Artificial Sequence
  Synthetic primer
acgttggatgaccattgggatcgtgttcag

SEQ ID NO: 4666 - DNA, 30 bp, Artificial Sequence
  Synthetic primer
acgttggatgccgcttaagtgttcctctag

SEQ ID NO: 4667 - DNA, 30 bp, Artificial Sequence
  Synthetic primer
acgttggatgatccattctcatcacatccc

SEQ ID NO: 4668 - DNA, 30 bp, Artificial Sequence
  Synthetic primer
acgttggatgacaaacactacgtccgtctg

SEQ ID NO: 4669 - DNA, 30 bp, Artificial Sequence
  Synthetic primer
acgttggatgggactcctcaaaactgtcag

SEQ ID NO: 4670 - DNA, 30 bp, Artificial Sequence
  Synthetic primer
acgttggatggtctctctcagcttctcttg

SEQ ID NO: 4671 - DNA, 30 bp, Artificial Sequence
  Synthetic primer
acgttggatgtttgaacctgggaggtggag

SEQ ID NO: 4672 - DNA, 30 bp, Artificial Sequence
  Synthetic primer
acgttggatgtggagtcttgttctgtcacc

SEQ ID NO: 4673 - DNA, 30 bp, Artificial Sequence
  Synthetic primer
acgttggatggaggcacgcatccaattcag

SEQ ID NO: 4674 - DNA, 30 bp, Artificial Sequence
  Synthetic primer
acgttggatggtgtcagagtgagactctgt

SEQ ID NO: 4675 - DNA, 30 bp, Artificial Sequence
  Synthetic primer
acgttggatggggttcaagcaattctcctg

SEQ ID NO: 4676 - DNA, 30 bp, Artificial Sequence
  Synthetic primer
acgttggatgaaattagatgggcgtggtgg

SEQ ID NO: 4677 - DNA, 30 bp, Artificial Sequence
  Synthetic primer
acgttggatgacacaggactgttgcagtgg

SEQ ID NO: 4678 - DNA, 30 bp, Artificial Sequence
  Synthetic primer
acgttggatgaagactacagagactccagc

SEQ ID NO: 4679 - DNA, 30 bp, Artificial Sequence
  Synthetic primer
acgttggatgtacagagactccagcatctg

SEQ ID NO: 4680 - DNA, 30 bp, Artificial Sequence
  Synthetic primer
acgttggatgtcagatttccagccacacag

SEQ ID NO: 4681 - DNA, 30 bp, Artificial Sequence
  Synthetic primer
acgttggatggtccatgagagacttccttc

SEQ ID NO: 4682 - DNA, 30 bp, Artificial Sequence
  Synthetic primer
acgttggatggggaatattcgtgtctggag

SEQ ID NO: 4683 - DNA, 30 bp, Artificial Sequence
  Synthetic primer
acgttggatgacacggtgcagagggtaaac

SEQ ID NO: 4684 - DNA, 30 bp, Artificial Sequence
  Synthetic primer
acgttggatgcaaaacccagctctgacctc

SEQ ID NO: 4685 - DNA, 30 bp, Artificial Sequence
  Synthetic primer
acgttggatgtttaccctctgcaccgtgtg

SEQ ID NO: 4686 - DNA, 30 bp, Artificial Sequence
  Synthetic primer
acgttggatgtgagaagctaacagcacagg

SEQ ID NO: 4687 - DNA, 30 bp, Artificial Sequence
  Synthetic primer
acgttggatgctcctatggttaatgttggg

SEQ ID NO: 4688 - DNA, 30 bp, Artificial Sequence
  Synthetic primer
acgttggatggtgctgttagcttctcatac

SEQ ID NO: 4689 - DNA, 30 bp, Artificial Sequence
  Synthetic primer
acgttggatgaactggaaaatccctgctgc

SEQ ID NO: 4690 - DNA, 30 bp, Artificial Sequence
  Synthetic primer
acgttggatgtgtcagctactccactcaac

SEQ ID NO: 4691 - DNA, 31 bp, Artificial Sequence
  Synthetic primer
acgttggatggggtcattatcaaaaaactgg

SEQ ID NO: 4692 - DNA, 31 bp, Artificial Sequence
  Synthetic primer
acgttggatgccaacattaaccataggagac

SEQ ID NO: 4693 - DNA, 30 bp, Artificial Sequence
  Synthetic primer
acgttggatggcccaaggatttgggtaaac

SEQ ID NO: 4694 - DNA, 30 bp, Artificial Sequence
  Synthetic primer
acgttggatgaatgccgaatccctcaaaag

SEQ ID NO: 4695 - DNA, 30 bp, Artificial Sequence
  Synthetic primer
acgttggatgcaaacttccaagatagactg

SEQ ID NO: 4696 - DNA, 30 bp, Artificial Sequence
  Synthetic primer
acgttggatgtgacttgtattctccaattc

SEQ ID NO: 4697 - DNA, 30 bp, Artificial Sequence
  Synthetic primer
acgttggatggtaagtttcatcctgacctc

SEQ ID NO: 4698 - DNA, 30 bp, Artificial Sequence
  Synthetic primer
acgttggatgctccttactgacctaaggag

SEQ ID NO: 4699 - DNA, 30 bp, Artificial Sequence
  Synthetic primer
acgttggatgtaaagagggagactggagag

SEQ ID NO: 4700 - DNA, 30 bp, Artificial Sequence
  Synthetic primer
acgttggatgccttagttcaaccctaccac

SEQ ID NO: 4701 - DNA, 30 bp, Artificial Sequence
  Synthetic primer
acgttggatgactttcctcaggcctctttg

SEQ ID NO: 4702 - DNA, 30 bp, Artificial Sequence
  Synthetic primer
acgttggatgaaaggacgtgtatgctcacc

SEQ ID NO: 4703 - DNA, 30 bp, Artificial Sequence
  Synthetic primer
acgttggatgttcgggatctcacagtctag

SEQ ID NO: 4704 - DNA, 30 bp, Artificial Sequence
  Synthetic primer
acgttggatggggccgtacctccttttaaa

SEQ ID NO: 4705 - DNA, 30 bp, Artificial Sequence
  Synthetic primer
acgttggatgaaagtactgggattacaggc

SEQ ID NO: 4706 - DNA, 30 bp, Artificial Sequence
  Synthetic primer
acgttggatgaatctcttcctgggtcttcg

SEQ ID NO: 4707 - DNA, 30 bp, Artificial Sequence
  Synthetic primer
acgttggatgattctcttgcctcagtctcc

SEQ ID NO: 4708 - DNA, 30 bp, Artificial Sequence
  Synthetic primer
acgttggatgcctgaccgacatggagaatc

SEQ ID NO: 4709 - DNA, 30 bp, Artificial Sequence
  Synthetic primer
acgttggatgcaagagcgagactccgttaa

SEQ ID NO: 4710 - DNA, 30 bp, Artificial Sequence
  Synthetic primer
acgttggatgttgatgatgcagtcttcgtg

SEQ ID NO: 4711 - DNA, 30 bp, Artificial Sequence
  Synthetic primer
acgttggatggggaccactagagtctaaac

SEQ ID NO: 4712 - DNA, 30 bp, Artificial Sequence
  Synthetic primer
acgttggatgtgtctgaagcaccaggaatg

SEQ ID NO: 4713 - DNA, 30 bp, Artificial Sequence
  Synthetic primer
acgttggatggacttttaggtctgagttgg

SEQ ID NO: 4714 - DNA, 31 bp, Artificial Sequence
  Synthetic primer
acgttggatgcttcctctagcagtgtatttc

SEQ ID NO: 4715 - DNA, 30 bp, Artificial Sequence
  Synthetic primer
acgttggatgccagtcgtttcaaaaggaac

SEQ ID NO: 4716 - DNA, 30 bp, Artificial Sequence
  Synthetic primer
acgttggatggcttcaatagtctgtaaccc

SEQ ID NO: 4717 - DNA, 30 bp, Artificial Sequence
  Synthetic primer
acgttggatgaaattagctgggcatggtgg

SEQ ID NO: 4718 - DNA, 30 bp, Artificial Sequence
  Synthetic primer
acgttggatgcccaggttcaagtgattctc

SEQ ID NO: 4719 - DNA, 30 bp, Artificial Sequence
  Synthetic primer
acgttggatgttctagatggaggcgaagag

SEQ ID NO: 4720 - DNA, 30 bp, Artificial Sequence
  Synthetic primer
acgttggatgcaaagtgctggcattacagg

SEQ ID NO: 4721 - DNA, 30 bp, Artificial Sequence
  Synthetic primer
acgttggatggctaactaacggctaatagg

SEQ ID NO: 4722 - DNA, 30 bp, Artificial Sequence
  Synthetic primer
acgttggatgaagaagctcaataggcactg

SEQ ID NO: 4723 - DNA, 30 bp, Artificial Sequence
  Synthetic primer
acgttggatgagtattccagaggcttgtgg

SEQ ID NO: 4724 - DNA, 30 bp, Artificial Sequence
  Synthetic primer
acgttggatgtgacatctgcccagcagtac

SEQ ID NO: 4725 - DNA, 30 bp, Artificial Sequence
  Synthetic primer
acgttggatggctaagctctgcttgaattc

SEQ ID NO: 4726 - DNA, 30 bp, Artificial Sequence
  Synthetic primer
acgttggatgcgagttggattatagactgc

SEQ ID NO: 4727 - DNA, 30 bp, Artificial Sequence
  Synthetic primer
acgttggatgagtctataatccaactcgcc

SEQ ID NO: 4728 - DNA, 30 bp, Artificial Sequence
  Synthetic primer
acgttggatgtgacagaatgagactctgtc

SEQ ID NO: 4729 - DNA, 30 bp, Artificial Sequence
  Synthetic primer
acgttggatgctgttttttctgctttcttc

SEQ ID NO: 4730 - DNA, 30 bp, Artificial Sequence
  Synthetic primer
acgttggatgggctccacaatttttaagtg

SEQ ID NO: 4731 - DNA, 30 bp, Artificial Sequence; identical to SEQ ID NO: 4730
  Synthetic primer

SEQ ID NO: 4732 - DNA, 30 bp, Artificial Sequence; identical to SEQ ID NO: 4729
  Synthetic primer

SEQ ID NO: 4733 - DNA, 30 bp, Artificial Sequence
  Synthetic primer
acgttggatgtgcccttggtgaatttcacg

SEQ ID NO: 4734 - DNA, 30 bp, Artificial Sequence
  Synthetic primer
acgttggatgtacctagaagtggtagggac

SEQ ID NO: 4735 - DNA, 30 bp, Artificial Sequence
  Synthetic primer
acgttggatggccgaagatgttttctactg

SEQ ID NO: 4736 - DNA, 30 bp, Artificial Sequence
  Synthetic primer
acgttggatgagcagctatccaggttattc

SEQ ID NO: 4737 - DNA, 30 bp, Artificial Sequence
  Synthetic primer
acgttggatggcctgctctgtaccagtaac

SEQ ID NO: 4738 - DNA, 30 bp, Artificial Sequence
  Synthetic primer
acgttggatgtgtctcacccaatttggctc

SEQ ID NO: 4739 - DNA, 30 bp, Artificial Sequence
  Synthetic primer
acgttggatggttttagcagctcagaaggg

SEQ ID NO: 4740 - DNA, 30 bp, Artificial Sequence
  Synthetic primer
acgttggatgcctcacacagttactggtac

SEQ ID NO: 4741 - DNA, 30 bp, Artificial Sequence; identical to SEQ ID NO: 4740
  Synthetic primer

SEQ ID NO: 4742 - DNA, 30 bp, Artificial Sequence; identical to SEQ ID NO: 4739
  Synthetic primer

SEQ ID NO: 4743 - DNA, 30 bp, Artificial Sequence
  Synthetic primer
acgttggatggaaatagaagcactttgggt

SEQ ID NO: 4744 - DNA, 31 bp, Artificial Sequence
  Synthetic primer
acgttggatgcttttataataaaaatctctc

SEQ ID NO: 4745 - DNA, 30 bp, Artificial Sequence
  Synthetic primer
acgttggatgactaggtaagggagtgaatg

SEQ ID NO: 4746 - DNA, 30 bp, Artificial Sequence
  Synthetic primer
acgttggatgttggaagatattcctggcag

SEQ ID NO: 4747 - DNA, 30 bp, Artificial Sequence
  Synthetic primer
acgttggatgctaaggtcttcctgtcactc

SEQ ID NO: 4748 - DNA, 30 bp, Artificial Sequence
  Synthetic primer
acgttggatgcctttcttcccaattgcatg

SEQ ID NO: 4749 - DNA, 30 bp, Artificial Sequence
  Synthetic primer
acgttggatgaaaacctgcgtggttggatg

SEQ ID NO: 4750 - DNA, 30 bp, Artificial Sequence
  Synthetic primer
acgttggatgcaggctggagaagtctagaa

SEQ ID NO: 4751 - DNA, 30 bp, Artificial Sequence
  Synthetic primer
acgttggatggctacattgaagaaggacgg

SEQ ID NO: 4752 - DNA, 30 bp, Artificial Sequence
  Synthetic primer
acgttggatgtgcacgtctttaaacacagc

SEQ ID NO: 4753 - DNA, 30 bp, Artificial Sequence
  Synthetic primer
acgttggatgtatcttttttcccccatcag

SEQ ID NO: 4754 - DNA, 30 bp, Artificial Sequence
  Synthetic primer
acgttggatggtaggttcaggtgtcatttg

SEQ ID NO: 4755 - DNA, 30 bp, Artificial Sequence
  Synthetic primer
acgttggatgcttctcgaggtcaaggtttc

SEQ ID NO: 4756 - DNA, 30 bp, Artificial Sequence
  Synthetic primer
acgttggatggatggtcaggtcatctcatg

SEQ ID NO: 4757 - DNA, 30 bp, Artificial Sequence
  Synthetic primer
acgttggatgccttgacctcgagaagaaag

SEQ ID NO: 4758 - DNA, 30 bp, Artificial Sequence
  Synthetic primer
acgttggatggtatggctgggtaaaaatgc

SEQ ID NO: 4759 - DNA, 30 bp, Artificial Sequence
  Synthetic primer
acgttggatgggttttactgcaaatgtgcg

SEQ ID NO: 4760 - DNA, 30 bp, Artificial Sequence
  Synthetic primer
acgttggatgtaagtggtaggaaatgatac

SEQ ID NO: 4761 - DNA, 30 bp, Artificial Sequence
  Synthetic primer
acgttggatgttcttccctgactccctaac

SEQ ID NO: 4762 - DNA, 30 bp, Artificial Sequence
  Synthetic primer
acgttggatgtggaaggcatttcaagcagg

SEQ ID NO: 4763 - DNA, 30 bp, Artificial Sequence
  Synthetic primer
acgttggatgcagggatctactccttggtc

SEQ ID NO: 4764 - DNA, 30 bp, Artificial Sequence
  Synthetic primer
acgttggatggaagatgcaaggtcagcagg

SEQ ID NO: 4765 - DNA, 30 bp, Artificial Sequence
  Synthetic primer
acgttggatgtttctagaaatgcgagctgg

SEQ ID NO: 4766 - DNA, 31 bp, Artificial Sequence
  Synthetic primer
acgttggatggacccattttccaaatgtcag

SEQ ID NO: 4767 - DNA, 30 bp, Artificial Sequence
  Synthetic primer
acgttggatgctgtcgaagtattgagcacc

SEQ ID NO: 4768 - DNA, 30 bp, Artificial Sequence
  Synthetic primer
acgttggatgctgaaggaccgaacacaatc

SEQ ID NO: 4769 - DNA, 30 bp, Artificial Sequence
  Synthetic primer
acgttggatgacctgggtgctgtgctgcgg

SEQ ID NO: 4770 - DNA, 29 bp, Artificial Sequence
  Synthetic primer
acgttggatgacgtgggaaccgggctgtc

SEQ ID NO: 4771 - DNA, 30 bp, Artificial Sequence
  Synthetic primer
acgttggatgcctctgaggttgcaaatctg

SEQ ID NO: 4772 - DNA, 30 bp, Artificial Sequence
  Synthetic primer
acgttggatgtggcgcccatttggcttttt

SEQ ID NO: 4773 - DNA, 30 bp, Artificial Sequence
  Synthetic primer
acgttggatgagagcccgtctttctccaca

SEQ ID NO: 4774 - DNA, 30 bp, Artificial Sequence
  Synthetic primer
acgttggatgccttcaacccatctggaaag

SEQ ID NO: 4775 - DNA, 30 bp, Artificial Sequence
  Synthetic primer
acgttggatgaaaccccagatattcccttg

SEQ ID NO: 4776 - DNA, 30 bp, Artificial Sequence
  Synthetic primer
acgttggatgtgagataaaagacacacagg

SEQ ID NO: 4777 - DNA, 30 bp, Artificial Sequence
  Synthetic primer
acgttggatgacgttggaatgccagtttgc

SEQ ID NO: 4778 - DNA, 30 bp, Artificial Sequence
  Synthetic primer
acgttggatgtcctgggaatgggcttctac

SEQ ID NO: 4779 - DNA, 30 bp, Artificial Sequence
  Synthetic primer
acgttggatgacctctagaatttcctggcc

SEQ ID NO: 4780 - DNA, 30 bp, Artificial Sequence
  Synthetic primer
acgttggatgcaaggacaagtgtcttaggg

SEQ ID NO: 4781 - DNA, 30 bp, Artificial Sequence; identical to SEQ ID NO: 4779
  Synthetic primer

SEQ ID NO: 4782 - DNA, 30 bp, Artificial Sequence
  Synthetic primer
acgttggatgtgtcggcgacaaggacaagt

SEQ ID NO: 4783 - DNA, 30 bp, Artificial Sequence
  Synthetic primer
acgttggatgccctgatatctcttactccc

SEQ ID NO: 4784 - DNA, 30 bp, Artificial Sequence
  Synthetic primer
acgttggatgagtgtgttcacgggcaatgg

SEQ ID NO: 4785 - DNA, 30 bp, Artificial Sequence
  Synthetic primer
acgttggatgtgaacgcagtgtgttcacgg

SEQ ID NO: 4786 - DNA, 30 bp, Artificial Sequence
  Synthetic primer
acgttggatgaagacacttgtccttgtcgc

SEQ ID NO: 4787 - DNA, 30 bp, Artificial Sequence
  Synthetic primer
acgttggatgcatgctgcagccaaacattg

SEQ ID NO: 4788 - DNA, 30 bp, Artificial Sequence
  Synthetic primer
acgttggatgtaggcaaggcaccatctcat

SEQ ID NO: 4789 - DNA, 30 bp, Artificial Sequence
  Synthetic primer
acgttggatgcactgccctgatgtcacaca

SEQ ID NO: 4790 - DNA, 30 bp, Artificial Sequence
  Synthetic primer
acgttggatgtgcagagtgatagggtcagg

SEQ ID NO: 4791 - DNA, 30 bp, Artificial Sequence
  Synthetic primer
acgttggatgctgcagagttcaaagatgcg

SEQ ID NO: 4792 - DNA, 30 bp, Artificial Sequence
  Synthetic primer
acgttggatgtcaggtcctggagttaaaag

SEQ ID NO: 4793 - DNA, 30 bp, Artificial Sequence
  Synthetic primer
acgttggatgagtcaccaaagctaagtgcc

SEQ ID NO: 4794 - DNA, 30 bp, Artificial Sequence
  Synthetic primer
acgttggatgacaccgtctctgggctgaag

SEQ ID NO: 4795 - DNA, 30 bp, Artificial Sequence; identical to SEQ ID NO: 4794
  Synthetic primer

SEQ ID NO: 4796 - DNA, 30 bp, Artificial Sequence
  Synthetic primer
acgttggatgaagctaagtgccaagatgcg

SEQ ID NO: 4797 - DNA, 30 bp, Artificial Sequence
  Synthetic primer
acgttggatgacctttaagcccaagttgag

SEQ ID NO: 4798 - DNA, 30 bp, Artificial Sequence
  Synthetic primer
acgttggatgactggcatgcagttgttacc

SEQ ID NO: 4799 - DNA, 30 bp, Artificial Sequence
  Synthetic primer
acgttggatgaccaacttccactcagaagc

SEQ ID NO: 4800 - DNA, 30 bp, Artificial Sequence
  Synthetic primer
acgttggatgcagcatggcttcatcttaac

SEQ ID NO: 4801 - DNA, 30 bp, Artificial Sequence
  Synthetic primer
acgttggatgaaattaaccctcgcagaggc

SEQ ID NO: 4802 - DNA, 30 bp, Artificial Sequence
  Synthetic primer
acgttggatggagaaagttccagaagaggg

SEQ ID NO: 4803 - DNA, 30 bp, Artificial Sequence
  Synthetic primer
acgttggatgcctctgcgagggttaatttc

SEQ ID NO: 4804 - DNA, 30 bp, Artificial Sequence
  Synthetic primer
acgttggatgcagaaacacccagagtgatg

SEQ ID NO: 4805 - DNA, 30 bp, Artificial Sequence
  Synthetic primer
acgttggatgagagatcagagagagagagc

SEQ ID NO: 4806 - DNA, 30 bp, Artificial Sequence
  Synthetic primer
acgttggatgaaggtgattaggtcaggagg

SEQ ID NO: 4807 - DNA, 30 bp, Artificial Sequence
  Synthetic primer
acgttggatggttacacactttctaggctc

SEQ ID NO: 4808 - DNA, 30 bp, Artificial Sequence
  Synthetic primer
acgttggatgtgggcccaaactatctctag

SEQ ID NO: 4809 - DNA, 30 bp, Artificial Sequence
  Synthetic primer
acgttggatgagcgcagttgtttgtctctc

SEQ ID NO: 4810 - DNA, 30 bp, Artificial Sequence
  Synthetic primer
acgttggatgccatgatgatggagcaacag

SEQ ID NO: 4811 - DNA, 30 bp, Artificial Sequence
  Synthetic primer
acgttggatggggtttggagaagaaaggag

SEQ ID NO: 4812 - DNA, 30 bp, Artificial Sequence
  Synthetic primer
acgttggatggtgactcactgtctagtctg

SEQ ID NO: 4813 - DNA, 30 bp, Artificial Sequence
  Synthetic primer
acgttggatgtcctgtgactcactgtctag

SEQ ID NO: 4814 - DNA, 29 bp, Artificial Sequence
  Synthetic primer
acgttggatggaaaggagactggtttggg

SEQ ID NO: 4815 - DNA, 30 bp, Artificial Sequence
  Synthetic primer
acgttggatgattggtgaggtctggctatg

SEQ ID NO: 4816 - DNA, 30 bp, Artificial Sequence
  Synthetic primer
acgttggatgcctgtaatcccagcactttg

SEQ ID NO: 4817 - DNA, 29 bp, Artificial Sequence
  Synthetic primer
acgttggatgccactgggaaaaggcactt

SEQ ID NO: 4818 - DNA, 30 bp, Artificial Sequence
  Synthetic primer
acgttggatggtagggttgttgggtcattc

SEQ ID NO: 4819 - DNA, 30 bp, Artificial Sequence
  Synthetic primer
acgttggatgctttcagaataagggccaac

SEQ ID NO: 4820 - DNA, 30 bp, Artificial Sequence
  Synthetic primer
acgttggatgctctcagacagcgttttaag

SEQ ID NO: 4821 - DNA, 24 bp, Artificial Sequence
  Synthetic primer
atctctaccaaacaatacaaaaat

SEQ ID NO: 4822 - DNA, 20 bp, Artificial Sequence
  Synthetic primer
tgcgcaaagtgccagagccc

SEQ ID NO: 4823 - DNA, 17 bp, Artificial Sequence
  Synthetic primer
ttccgtgaatgggaatg

SEQ ID NO: 4824 - DNA, 17 bp, Artificial Sequence
  Synthetic primer
cctcagtttcctcttcc

SEQ ID NO: 4825 - DNA, 17 bp, Artificial Sequence
  Synthetic primer
aggagagcagcactcac

SEQ ID NO: 4826 - DNA, 19 bp, Artificial Sequence
  Synthetic primer
ccccactattctgataacc

SEQ ID NO: 4827 - DNA, 20 bp, Artificial Sequence
  Synthetic primer
cagagtccccatgtgcacgc

SEQ ID NO: 4828 - DNA, 18 bp, Artificial Sequence
  Synthetic primer
gccagtgtggttgcaatt

SEQ ID NO: 4829 - DNA, 17 bp, Artificial Sequence
  Synthetic primer
agccgctgccccaggtg

SEQ ID NO: 4830 - DNA, 17 bp, Artificial Sequence
  Synthetic primer
tgctttggtgctctctt

SEQ ID NO: 4831 - DNA, 22 bp, Artificial Sequence
  Synthetic primer
ccaaattttggttgcttcaagg

SEQ ID NO: 4832 - DNA, 23 bp, Artificial Sequence
  Synthetic primer
tatagacattatctgacaacact

SEQ ID NO: 4833 - DNA, 20 bp, Artificial Sequence
  Synthetic primer
ggagaatctgcccagctcat

SEQ ID NO: 4834 - DNA, 20 bp, Artificial Sequence
  Synthetic primer
gcctgggtaacatggtgaaa

SEQ ID NO: 4835 - DNA, 23 bp, Artificial Sequence
  Synthetic primer
aaaaacttaagatacatagggac

SEQ ID NO: 4836 - DNA, 21 bp, Artificial Sequence
  Synthetic primer
cttctgacgctgctaactaac

SEQ ID NO: 4837 - DNA, 22 bp, Artificial Sequence
  Synthetic primer
agtcctagttcctttctgttta

SEQ ID NO: 4838 - DNA, 25 bp, Artificial Sequence
  Synthetic primer
ttcccaactcttttttttttttttt

SEQ ID NO: 4839 - DNA, 22 bp, Artificial Sequence
  Synthetic primer
tagagaggatatagaaaaggag

SEQ ID NO: 4840 - DNA, 21 bp, Artificial Sequence
  Synthetic primer
ctgagaacactggttgagagt

SEQ ID NO: 4841 - DNA, 22 bp, Artificial Sequence
  Synthetic primer
ttttcctgcccttatttgtcat

SEQ ID NO: 4842 - DNA, 18 bp, Artificial Sequence
  Synthetic primer
gaacccaggaggcagagc

SEQ ID NO: 4843 - DNA, 21 bp, Artificial Sequence
  Synthetic primer
ccagcccacatgtgtctttat

SEQ ID NO: 4844 - DNA, 23 bp, Artificial Sequence
  Synthetic primer
cacagaaagtgtcctttataaac

SEQ ID NO: 4845 - DNA, 22 bp, Artificial Sequence
  Synthetic primer
ccctttctcatttttgatactg

SEQ ID NO: 4846 - DNA, 23 bp, Artificial Sequence
  Synthetic primer
agagaaaacaaatgaacccaaaa

SEQ ID NO: 4847 - DNA, 23 bp, Artificial Sequence
  Synthetic primer
gggttcatttgttttctctattg

SEQ ID NO: 4848 - DNA, 23 bp, Artificial Sequence
  Synthetic primer
tcatttgttttctctattgtctg

SEQ ID NO: 4849 - DNA, 21 bp, Artificial Sequence
  Synthetic primer
cagctgaatgaagacactaca

SEQ ID NO: 4850 - DNA, 21 bp, Artificial Sequence
  Synthetic primer
ccatcaacatggcttatcacc

SEQ ID NO: 4851 - DNA, 21 bp, Artificial Sequence
  Synthetic primer
tcagggtcctcaaaaataagg

SEQ ID NO: 4852 - DNA, 19 bp, Artificial Sequence
  Synthetic primer
gaggtggaggttgcagtga

SEQ ID NO: 4853 - DNA, 17 bp, Artificial Sequence
  Synthetic primer
attcagctgatgatccc

SEQ ID NO: 4854 - DNA, 19 bp, Artificial Sequence
  Synthetic primer
tctcctgactcagtctccc

SEQ ID NO: 4855 - DNA, 17 bp, Artificial Sequence
  Synthetic primer
ggtcaggctcttcagcg

SEQ ID NO: 4856 - DNA, 20 bp, Artificial Sequence
  Synthetic primer
cctggtctcttctcgctgaa

SEQ ID NO: 4857 - DNA, 19 bp, Artificial Sequence
  Synthetic primer
ctgtcctgcaagcagggaa

SEQ ID NO: 4858 - DNA, 19 bp, Artificial Sequence
  Synthetic primer
ggtaaacccaggctcacag

SEQ ID NO: 4859 - DNA, 18 bp, Artificial Sequence
  Synthetic primer
gacaggtgctccgccaga

SEQ ID NO: 4860 - DNA, 20 bp, Artificial Sequence
  Synthetic primer
tgttggggttgagtggagta

SEQ ID NO: 4861 - DNA, 20 bp, Artificial Sequence
  Synthetic primer
cctgctgcggagactattca

SEQ ID NO: 4862 - DNA, 20 bp, Artificial Sequence
  Synthetic primer
aactggaaaatccctgctgc

SEQ ID NO: 4863 - DNA, 20 bp, Artificial Sequence
  Synthetic primer
ggtaaacacactcgcaacag

SEQ ID NO: 4864 - DNA, 23 bp, Artificial Sequence
  Synthetic primer
tagactgcctttgtatatctttt

SEQ ID NO: 4865 - DNA, 22 bp, Artificial Sequence
  Synthetic primer
gccaacaatggctacatctttt

SEQ ID NO: 4866 - DNA, 21 bp, Artificial Sequence
  Synthetic primer
ggaattctgtaatgtgggctg

SEQ ID NO: 4867 - DNA, 20 bp, Artificial Sequence
  Synthetic primer
ggtgctacctctttagccac

SEQ ID NO: 4868 - DNA, 22 bp, Artificial Sequence
  Synthetic primer
tttttgcttagcatggtggaaa

SEQ ID NO: 4869 - DNA, 18 bp, Artificial Sequence
  Synthetic primer
ccgggccttccctaggtt

SEQ ID NO: 4870 - DNA, 17 bp, Artificial Sequence
  Synthetic primer
cccgccaccacgcccgg

SEQ ID NO: 4871 - DNA, 25 bp, Artificial Sequence
  Synthetic primer
gactccgttaaaaaaaaaaaaaaaa

SEQ ID NO: 4872 - DNA, 20 bp, Artificial Sequence
  Synthetic primer
tctaaacttgataaggcaac

SEQ ID NO: 4873 - DNA, 21 bp, Artificial Sequence
  Synthetic primer
ttggtccattagggaattaga

SEQ ID NO: 4874 - DNA, 23 bp, Artificial Sequence
  Synthetic primer
gggaaatactaggaatgaatact

SEQ ID NO: 4875 - DNA, 17 bp, Artificial Sequence
  Synthetic primer
ggcatggtggcgggtgc

SEQ ID NO: 4876 - DNA, 18 bp, Artificial Sequence
  Synthetic primer
cattggccgggcatggtg

SEQ ID NO: 4877 - DNA, 21 bp, Artificial Sequence
  Synthetic primer
taggggagagctaaaaacaac

SEQ ID NO: 4878 - DNA, 22 bp, Artificial Sequence
  Synthetic primer
tgatggcagcatcttattacat

SEQ ID NO: 4879 - DNA, 22 bp, Artificial Sequence
  Synthetic primer
cttgaattctcattgagcatct

SEQ ID NO: 4880 - DNA, 20 bp, Artificial Sequence
  Synthetic primer
taatccaactcgccttctcc

SEQ ID NO: 4881 - DNA, 25 bp, Artificial Sequence
  Synthetic primer
taaaaagtggtagactttttttttt

SEQ ID NO: 4882 - DNA, 24 bp, Artificial Sequence
  Synthetic primer
aagaatttgcccagaaaaaaaaaa

SEQ ID NO: 4883 - DNA, 18 bp, Artificial Sequence
  Synthetic primer
acccgaagctagggtcgc

SEQ ID NO: 4884 - DNA, 23 bp, Artificial Sequence
  Synthetic primer
gaatattctatgatgttaggtgt

SEQ ID NO: 4885 - DNA, 19 bp, Artificial Sequence
  Synthetic primer
gaggtgctggggagtgtgt

SEQ ID NO: 4886 - DNA, 18 bp, Artificial Sequence
  Synthetic primer
gcaaacatccccgggagc

SEQ ID NO: 4887 - DNA, 19 bp, Artificial Sequence
  Synthetic primer
cccggggatgtttgctgaa

SEQ ID NO: 4888 - DNA, 23 bp, Artificial Sequence
  Synthetic primer
gatttaaatgggagtatgatgta

SEQ ID NO: 4889 - DNA, 20 bp, Artificial Sequence
  Synthetic primer
ggggatggtgaatgacctct

SEQ ID NO: 4890 - DNA, 21 bp, Artificial Sequence
  Synthetic primer
agagtgaccattcctatgttc

SEQ ID NO: 4891 - DNA, 21 bp, Artificial Sequence
  Synthetic primer
tgcgtggttggatgtttttca

SEQ ID NO: 4892 - DNA, 19 bp, Artificial Sequence
  Synthetic primer
gaagaaggacggtgactcg

SEQ ID NO: 4893 - DNA, 17 bp, Artificial Sequence
  Synthetic primer
tcccccatcaggacacc

SEQ ID NO: 4894 - DNA, 20 bp, Artificial Sequence
  Synthetic primer
ggtcaaggtttcaaaaatgg

SEQ ID NO: 4895 - DNA, 24 bp, Artificial Sequence
  Synthetic primer
gagaagaaagagagaaagctttta

SEQ ID NO: 4896 - DNA, 17 bp, Artificial Sequence
  Synthetic primer
tgcgaacgatccatcta

SEQ ID NO: 4897 - DNA, 19 bp, Artificial Sequence
  Synthetic primer
tttcccccactgtctctgg

SEQ ID NO: 4898 - DNA, 20 bp, Artificial Sequence
  Synthetic primer
ggtccctggtctctggtttt

SEQ ID NO: 4899 - DNA, 22 bp, Artificial Sequence
  Synthetic primer
atgcgagctggatttttaaaca

SEQ ID NO: 4900 - DNA, 20 bp, Artificial Sequence
  Synthetic primer
gaagactgtgggagttttgg

SEQ ID NO: 4901 - DNA, 17 bp, Artificial Sequence
  Synthetic primer
tgcggccaggcagagcc

SEQ ID NO: 4902 - DNA, 19 bp, Artificial Sequence
  Synthetic primer
cagttaggatgcgggaggc

SEQ ID NO: 4903 - DNA, 23 bp, Artificial Sequence
  Synthetic primer
ctttctccacaccattttttttt

SEQ ID NO: 4904 - DNA, 25 bp, Artificial Sequence
  Synthetic primer
gatattcccttggttaaaaaaaaaa

SEQ ID NO: 4905 - DNA, 19 bp, Artificial Sequence
  Synthetic primer
aggttttgtgtcatctagc

SEQ ID NO: 4906 - DNA, 17 bp, Artificial Sequence
  Synthetic primer
cctgccaccctgatatc

SEQ ID NO: 4907 - DNA, 19 bp, Artificial Sequence
  Synthetic primer
gccaccctgatatctctta

SEQ ID NO: 4908 - DNA, 20 bp, Artificial Sequence
  Synthetic primer
cttactccctaagacacttg

SEQ ID NO: 4909 - DNA, 18 bp, Artificial Sequence
  Synthetic primer
cgggcaatgggcagagag

SEQ ID NO: 4910 - DNA, 21 bp, Artificial Sequence
  Synthetic primer
aaacattgacaccccaagttc

SEQ ID NO: 4911 - DNA, 20 bp, Artificial Sequence
  Synthetic primer
cactaccctgatctcacaca

SEQ ID NO: 4912 - DNA, 17 bp, Artificial Sequence
  Synthetic primer
aaggcagtttggagagc

SEQ ID NO: 4913 - DNA, 17 bp, Artificial Sequence
  Synthetic primer
agctaagtgccaagatg

SEQ ID NO: 4914 - DNA, 20 bp, Artificial Sequence
  Synthetic primer
ggcaccaggagcaggtcctc

SEQ ID NO: 4915 - DNA, 17 bp, Artificial Sequence
  Synthetic primer
ttctgtcactcaccccc

SEQ ID NO: 4916 - DNA, 18 bp, Artificial Sequence
  Synthetic primer
gacagggtctttgcacac

SEQ ID NO: 4917 - DNA, 17 bp, Artificial Sequence
  Synthetic primer
aggccgcctctttatca

SEQ ID NO: 4918 - DNA, 19 bp, Artificial Sequence
  Synthetic primer
aatttcagtgtcaacttgg

SEQ ID NO: 4919 - DNA, 20 bp, Artificial Sequence
  Synthetic primer
tctcttcttataagggcact

SEQ ID NO: 4920 - DNA, 22 bp, Artificial Sequence
  Synthetic primer
tagctttataggacaggtctag

SEQ ID NO: 4921 - DNA, 23 bp, Artificial Sequence
  Synthetic primer
cagttgtttgtctctcttgccca

SEQ ID NO: 4922 - DNA, 20 bp, Artificial Sequence
  Synthetic primer
agaaaggagactggtttggg

SEQ ID NO: 4923 - DNA, 21 bp, Artificial Sequence
  Synthetic primer
ctgtctagtctgttcactttc

SEQ ID NO: 4924 - DNA, 17 bp, Artificial Sequence
  Synthetic primer
agcgatcctcccacctc

SEQ ID NO: 4925 - DNA, 17 bp, Artificial Sequence
  Synthetic primer
cagaataagggccaact

SEQ ID NO: 4926 - DNA, 20 bp, Artificial Sequence
  Synthetic primer
ataagggccaactgatgtat

SEQ ID NO: 4927 - DNA, 23 bp, Artificial Sequence
  Illustrative oligonucleotide
  misc_feature (3)..(21): n is a, c, g, or t
aannnnnnnnnnnnnnnnnnntt

SEQ ID NO: 4928 - RNA, 19 nt, Artificial Sequence
  Synthetic oligonucleotide
acaaccggaagguguauga

SEQ ID NO: 4929 - RNA, 19 nt, Artificial Sequence
  Synthetic oligonucleotide
gccaaccaaugugcuauuc

SEQ ID NO: 4930 - RNA, 19 nt, Artificial Sequence
  Synthetic oligonucleotide
gaucaccauggagccaauu

SEQ ID NO: 4931 - RNA, 19 nt, Artificial Sequence
  Synthetic oligonucleotide
cugucacucgagaucuuga

SEQ ID NO: 4932 - RNA, 19 nt, Artificial Sequence
  Synthetic oligonucleotide
gaguuggauagcaagacaa

SEQ ID NO: 4933 - RNA, 19 nt, Artificial Sequence
  Synthetic oligonucleotide
cguacgcggaauacuucga

SEQ ID NO: 4934 - DNA, 13 bp, Homo sapiens
ttttttttttttt

SEQ ID NO: 4935 - DNA, 10 bp, Homo sapiens
aagagaagag

SEQ ID NO: 4936 - DNA, 10 bp, Homo sapiens
agaaagaaag

SEQ ID NO: 4937 - DNA, 18 bp, Homo sapiens
tccatatggctgaggagg

SEQ ID NO: 4938 - DNA, 484 bp, Homo sapiens
ccgtaccctagttcgttctcagcaccccgaggattcgggcagataaggggcgggccttgaccggagggaggggtatggtcagtatactacgaccaaatgctccgcccccaggcttcccggcaccactcctgaccctgagcgaacccagcgtctccgaggggcagatggtgacagtaacctgcgcagctggggcccaagctctggtcacactggagggagttccagccgcggtcccggggcagcccgcccagcttcagctaaatgccaccgagaacgacgacagacgcagcttcttctgcgacgccaccctcgatgtggacggggagaccctgatcaagaacaggagcgcagagcttcgtgtcctatgtgagttggtgataacccctcgccccccaccttctggtgacttccaaggacccgcctgctycctcaccgtgtcgtggaggcggagccatttcttacgtctaagcctctgtaaccccac

SEQ ID NO: 4939 - DNA, 520 bp, Homo sapiens
gggaaggaggctctgataggaggcaggatcctcttctgcccatcagaggcgcggtggtctcccatcgatcgttgtgggccggagcagggcatttgatcagtggctgggccggcgctaagccccacttcaccttctgtgcccttcagaccggccagtggtggccgaacttgctgcctcgccccctggaggcgtgcgcccaggaggaaacttcacgttgacctgccgcgcrgaggcctggcctccagcccagatcagctggcgcgcgcccccgggggccctcaacatcggcctgtcgagcaacaacagcacactgagcgtggcaggcgccatgggaagccacggcggcgagtacgagtgcgcagccaccaacgcgcacgggcgccacgcgcggcgcatcacggtgcgcgtggccggtaagtggcagctggggagaggcggggcgaggtatctgagagggggcgtgacctgggtcttggggcggccggccccgcctgcctccctctcggtcccggtagactag

SEQ ID NO: 4940 - DNA, 401 bp, Homo sapiens
agcaaggcagatgatggaacaacaaagagaatcaccactgtaaaagccccccagtcctttgcccactaggtctgctttcctataatatgtctaggaggtgatgatattatcaaattcacagaatataatatgttctgcattcacttgtctgtcttaacacacacacacacacacacacacacacacacacacacacacacmccaaatatttcttaaatagtcacctgttatttcccaagaacatcccaacttttccggtaggcaagtgtcaagtcacctggacaatattcctgaaaaaaagtgaaggttctacctggggttggggctcattttggaacatgaagttggcactctgaggagcctaaccttctgttaggcttcctttggggcagttggtttgc

SEQ ID NO: 4941 - DNA, 401 bp, Homo sapiens
aacataaaacaattccatttagaatagcatcaagaaatacatatttaggaataaagttagcaaaagaagtacaagttttgtactctgaaaactacgaaacattgttgaaagaaattaaagaggatctaataactggaaaaacatttcattgctcatggattagaatatttaatattgtcaagaaatgacagatactccccraattgatgtacagattaagccaatacttatcaaaatcatagctgtcttttttgcagaaattgacaagccccatcttaaaatttgtgtggaaatgcaaaggatacagaatatccaaaataaccttgaaaaacaacacagctgggaaatttacatgttctgatttcaaaacttactacaaagctacaatattcaagacagag

SEQ ID NO: 4942 - DNA, 823 bp, Homo sapiens
tttgatgaggcacatttaccctttagcccatgttaacattttcttcaggattcattactattaaaattatttatgaaaaagtttttgtactggatcattaccatcagaataatcagaatgaatgccacactgaatatcaaaagaaataaaactaaaatcattataaggacacaaccatgtgatatttgtccatctgctctttaagcaatgttatgttatttcttgcaacccctacacaaaggccaagaaattacacaagtactagtttattggttattcacggagagtgagtacctgaaggagaaggctgtccttttactacaccatttttagtcttttcttctgaattcattacttccttgtagataagttctgtaagaaacagctgtgttattatagaaaacaaatttatccttcatccacagggaaattcattacttaatgccaaataattacgttttgatggggttgagtaaattaaaaatcarttgagattcctttactgctctatttctatttctatattgccttgtaattagcagagagcctggcacaaataggtatctagtaaagcagttgaagaaatcaatgcatgaaaatttatttctacgtacatgaaacatactatttatttccatatacatagtatttatttctacatacatttctacataaataacatttatttctacatgcatgaaatatttctacataaatgaaacaagtaatacatgttttacttgttttctgaattctttgggggaagtactaatacattctagctcaatctagcaacaatttttatggctttgaacatccattt

SEQ ID NO: 4943 - DNA, 823 bp, Homo sapiens
tttgatgaggcacatttaccctttagcccatgttaacattttcttcaggattcattactattaaaattatttatgaaaaagtttttgtactggatcattaccatcagaataatcagaatgaatgccacactgaatatcaaaagaaataaaactaaaatcattataaggacacaaccatgtgatatttgtccatctgctctttaagcaatgttatgttatttcttgcaacccctacacaaaggccaagaaattacacaagtactagtttattggttattcacggagagtgagtacctgaaggagaaggctgtccttttactacaccatttttagtcttttcttctgaattcattacttccttgtagataagttctgtaagaaacagctgtgttattatagaaaacaaatttatccttcatccacagggaaattcattacttaatgccaaataattacgttttgatggggttgagtaaattaaaaatcaattgagattcctttactgctctatttctatttctatattgccttgtaattarcagagagcctggcacaaataggtatctagtaaagcagttgaagaaatcaatgcatgaaaatttatttctacgtacatgaaacatactatttatttccatatacatagtatttatttctacatacatttctacataaataacatttatttctacatgcatgaaatatttctacataaatgaaacaagtaatacatgttttacttgttttctgaattctttgggggaagtactaatacattctagctcaatctagcaacaatttttatggctttgaacatccattt

SEQ ID NO: 4944 - DNA, 572 bp, Homo sapiens
ggtatcgacaaacactgacaatcagtaccattttaaaaggtatcaatggtaaatgcctttcattcttgagcaaaygtgacattgctttcggcatgaaaagacagatgaagttttaggagctttaaaaatggtctaagagaatagcagtcagcaaatcattttttagtaaattgttttacaaggaaaagccttgttgatactttctgagttcaataaaataaaaagtatacttttttaagtagtagacttacctttccattcttcaattgtgtgttctctttcatccaactgcttgtcatatatctgaggtggaggctgccgaataaaaacaaaaaataatctttgtgtgataatgtaaacataactaaactcttacaatgcacgagaataccttgccctcatttatttcggtgatttcaaccgtatataagttatgaggaaattacagtagttcagaagttaaaattttcctgtaaacttatggaggattcattcatattgcaatatttgctgctgacccaatattgctgcaatatttgcagcagaacgcaaatcccgagagctcactttcc

SEQ ID NO: 4945 - DNA, 224 bp, Homo sapiens
tgagggcaaggtattctcgtgcattgtaagagtttagttatgtttacattatcacacaaagattattttttgtttttattyggcagcctccacctcagatatatgacaagcagttggatgaaagagaacacacaattgaagaatggaaaggtaagtctactacttaaaaaagtatactttttattttattgaactcagaaagtatcaacaaggcttttccttgt

SEQ ID NO: 4946 - DNA, 572 bp, Homo sapiens
ggtatcgacaaacactgacaatcagtaccattttaaaaggtatcaatggtaaatgcctttcattcttgagcaaatgtgacattgctttcggcatgaaaagacagatgaagttttaggagctttaaaaatggtctaagagaatagcagtcagcaaatcattttttagtaaattgttttacaaggaaaagccttgttgatactttctgagttcaataaaataaaaagtatacttttttaagtagtagacttacctttccattcttcaattgtgtgttctctttcatccaactgcttgtcatatatctgaggtggaggctgccraataaaaacaaaaaataatctttgtgtgataatgtaaacataactaaactcttacaatgcacgagaataccttgccctcatttatttcggtgatttcaaccgtatataagttatgaggaaattacagtagttcagaagttaaaattttcctgtaaacttatggaggattcattcatattgcaatatttgctgctgacccaatattgctgcaatatttgcagcagaacgcaaatcccgagagctcactttcc

SEQ ID NO: 4947 - DNA, 572 bp, Homo sapiens
ggtatcgacaaacactgacaatcagtaccattttaaaaggtatcaatggtaaatgcctttcattcttgagcaaatgtgacattgctttcggcatgaaaagacagatgaagttttaggagctttaaaaatggtctaagagaatagcagtcagcaaatcattttttagtaaattgttttacaaggaaaagccttgttgatactttctgagttcaataaaataaaaagtatacttttttaagtagtagacttacctttccattcttcaattgtgtgttctctttcatccaactgcttgtcatatatctgaggtggaggctgccgaataaaaacaaaaaataatctttgtgtgataatgtaaacataactaaactcttacaaygcacgagaataccttgccctcatttatttcggtgatttcaaccgtatataagttatgaggaaattacagtagttcagaagttaaaattttcctgtaaacttatggaggattcattcatattgcaatatttgctgctgacccaatattgctgcaatatttgcagcagaacgcaaatcccgagagctcactttcc

SEQ ID NO: 4948 - DNA, 572 bp, Homo sapiens
ggtatcgacaaacactgacaatcagtaccattttaaaaggtatcaatggtaaatgcctttcattcttgagcaaatgtgacattgctttcggcatgaaaagacagatgaagttttaggagctttaaaaatggtctaagagaatagcagtcagcaaatcattttttagtaaattgttttacaaggaaaagccttgttgatactttctgagttcaataaaataaaaagtatacttttttaagtagtagacttacctttccattcttcaattgtgtgttctctttcatccaactgcttgtcatatatctgaggtggaggctgccgaataaaaacaaaaaataatctttgtgtgataatgtaaacataactaaactcttacaatgcacgagaataccttgccctcatttatttcggtgatttcaaccgtatataagttatgaggaaattacagtagttcagaagttaaaattttcytgtaaacttatggaggattcattcatattgcaatatttgctgctgacccaatattgctgcaatatttgcagcagaacgcaaatcccgagagctcactttcc

SEQ ID NO: 4949 - DNA, 572 bp, Homo sapiens
ggtatcgacaaacactgacaatcagtaccattttaaaaggtatcaatggtaaatgcctttcattcttgagcaaatgtgacattgctttcggcatgaaaagacagatgaagttttaggagctttaaaaatggtctaagagaatagcagtcagcaaatcattttttagtaaattgttttacaaggaaaagccttgttgatactttctgagttcaataaaataaaaagtatacttttttaagtagtagacttacctttccattcttcaattgtgtgttctctttcatccaactgcttgtcatatatctgaggtggaggctgccgaataaaaacaaaaaataatctttgtgtgataatgtaaacataactaaactcttacaatgcacgagaataccttgccctcatttatttcggtgatttcaaccgtatataagttatgaggaaattacagtagttcagaagttaaaattttcctgtaaacttayggaggattcattcatattgcaatatttgctgctgacccaatattgctgcaatatttgcagcagaacgcaaatcccgagagctcactttcc

SEQ ID NO: 4950 - DNA, 217 bp, Homo sapiens
tctccatttctgccatagcactagtgagtgactttgagttgaaatacaatttaaaaataatacattctctctcttttttctttctctcgtttcctctgtcccttccrctctctttcagattattagtttattaaatgtcttcacaccccagaaaacgctggaggagttccaagatgtgtaagtaacaaaactcatgaaggaagggagagcacagcac

SEQ ID NO: 4951 - DNA, 401 bp, Homo sapiens
gtgcctttctgaaccctgtgacccagcagcctccatcaactcgtcctacctgccatgcacagctcctctgtgcccctgtacctgagctcatgctattccctctgccaggatgcccttctccttctccaccaggagaagaacacttgccagtaagacccagttctaatgtcaccccttcctgacggtatcaggaagagtcastgatggtgttttatgctcccagagaatttgccacattgtgttgtgattatttttccacatctgtctcccccactggaatgagagcctcactcatcttcatacctccctggtctctacctggtgccagaaccatcctcagggcaggggaatgctcaggaaatagatattgaataaaataagtgtatccatccatccatcca

SEQ ID NO: 4952 - DNA, 401 bp, Homo sapiens
tctctgcccgactacagtctactaaacctgaagcccacatgcccttcagtccacatccgtagtggcctttccctgaccagctcctgccctatctttgccttctttgagaccagacacaaagtgtcacaccctctttgcatgcacaatctcccgtaggaggaagggaaccaatcctcagggaacacccaggtgcagagccttactctaaggcacttggcatgtgagctctcttaggacaggggaacttgtttctcctcaaagccactctgagaagtcacttcaccctcttttcagaggaggaaactgagttcagagatttaagcaaattgaccagagtaacagtgactaaatggcagagtaagatttggtccacctaactccaaaagcccatgggggcttat

SEQ ID NO: 4953 - DNA, 751 bp, Homo sapiens
aaaccaatcacagccatcacacctctaattcagaactacaaatcaacatttagggtcacagcccagtacccgggaagccgccaattatgggataaggaaaggggcaaaatatgcaggtctctggagagactgaagcataagacaggtgctgggacattcttctcaaccctctcttggggagccttccagaccacctcagccctgaggggcctccatgcacacaccaccttaacacccaccttaaaggaaaggtctccattctcctccgaaagctggttgattttgcgatccatctggctcttctctgtcttcaggtcctggcactgcttcagggtttcatgcagccgcatggtaaggctgcgagggagggaagcagtgagaagagagtatgggytcctggctgggtgaggggaggggctggggcctgggaaggaatgcagggagagctgtacctctcattcttgtcacgcagctcctcaagctccttgggctccagtgggctggccgcctgcttctcattcagcagggctaggcggtcaatgcgctgctgcatcatggctatctgtgcatctgcccagagtggagggaggaggagaggagaatcagaactatgtgcatgagcggaactatgtgcacagaactatgtgcacaaggggaagggaggagacggcatagggaagaggaggaatatggtatccaatctaagggaaagagaagatggggacaaagacagaacctagcttccaggagg

SEQ ID NO: 4954 - DNA, 731 bp, Homo sapiens
agacggcatagggaagaggaggaatatggtatccaatctaagggaaagagaagatggggacaaagacagaacctagcttccaggaggtcagcctgaccacaggcccagggctgagctctcagctccaggggccagcagaggggacaacatgggaggccaggggacatccttccggcaagtctattcacacatctgccagtgtgccagccacctacccttctcggtgaggagcttgcggttctcagctagctccagctccagctcatccctattacttctctcatcagcaagctgcttcttcagccgtctcatctggaactgtggggtctgcaggatatcacccatgggagaagctggagaacctgagagaaagctgaggagggagaaggcccatatgcattggtaagcgcctaagatstgaagcaatcagcaacaggcagcagtaagggagcggggtctatggaagtgcgcactagcagctgggaggcctgtgcacctgggttgtttgcagtgctacctcaagcctcatgacatgatcttgggaaaacttttcttctcactgccttaatttctttgtcagaaaaaaaaaaagtgatatattctccttggctctgcagagatgtgctaagagaagagacttcattgtagtctccgaggaagaagggtattccataaacagggaacagcttttgagggaggccttctgcacatgacaaatcccaaccacttcc

SEQ ID NO: 4955 - DNA, 770 bp, Homo sapiens
gcctgctaccacatccagctaatttttttttttgagacggagtctcgctctgtcacccaggctggagtgcagtggcacgatctcggctcactgcaaactccgccttccaggttcacgccattctcctgcctcagcctcccaagtagctgggactataggcacctactaccacgcctggctaattttttgtatktttagtagagacggggtttcaccatgttagccaggatggtctccatctcctgaccttgtgatccacccacctcggcttcccccagctaattttttatattttagtagagacaaggtttcgccatgttggccaggctggtcttgaactcctgacctcaggtgatccgtctgctttggcctcccaaagtgctgggattagaagcgtgagccaccacgcccagcctttttttgtatttttagtagagatggggtttcgccatgttggccaggctggtctcaaactcctgacctcaggtgatctgcccacctcagcctcccaaagtgctaggattacaggataagccactgcacctggccagctctagtcttattttgctgaaaaagggaggcaattgagggaaaggcctgctggcctgggacactggagacgtgggtttaccacacagccttgggaaatttatctaactctctgggcccctttgtacttttcagcttagagatttgggggttaaagtagatcagtaatttccaaactcttcacagagtaccagggtctgtagagatgcctcacaggcctc

SEQ ID NO: 4956 - DNA, 519 bp, Homo sapiens
cacacagccttgggaaatttatctaactctctgggcccctttgtacttttcagcttagagatttgggggttaaagtagatcagtaatttccaaactcttcacagagtaccagggtctgtagagatgcctcacaggcctccatgacaggccaagaagatggcctatgatctctgaaaccagcccccacttcaatcagatcaaagtaattccattctgttttatatgctgggattctgcttaagatttcatttgataaaaagaatcttctgcttaaaaacatttgcttgctgactccatattaggtattcccagaagagcctggtctgctttctctctccaccccccaacccgccatgtctcccttcacccccaggggctgttggtaattccaytgagtctgaggcagggcccccaagaatcaaagctgcctcagattcaggtctgttcagctttgacagtgttcccatcatcactggacaagggacaagaacagtctcatccagtctgaggttagcccaa

SEQ ID NO: 4957 - DNA, 401 bp, Homo sapiens
tccaaggaaaagcaagtgtgaagtcgggctggcagggaagcatgttctgtgtcagccggcactgggcgtgggccagggtgtgggaggtgggtaggtctggctcccctcccatggatttccctattgtttctcctgggtgctcaggcctgtcacgcctctgccatcacttgaccctaggtgcaagggttcagcccagaaatkttatgcaattgactcatgatttctcaggttttctgcatcctggcctagagtgacttcccaagaaaaacctccaccatttctgcttgtcttgcctgccttgtatttacctttctaggattgccttttccacatttagtcaagtctaggttcagacccacgtgcaggctatagctccttcgttctccaccactctcaggatc

SEQ ID NO: 4958 - DNA, 409 bp, Homo sapiens
gatatcctccttccagccaaagcgaaaaggtaattttctatatcttctttttcttaatgggaaaaagatttaaaaattcattcaaggcagggtacagtggctcacacctataattccagcactttgggaggccgaggtaagaggattgcttgcggccaagggttctaaaccaaccaggcgtggtggctcactcctgtaatcccagcactttggraggccgaggcgggcagatcaccttaggtaagaagttcgagattagcctggccaacatggtgaaaccctgtctctactaaaaatacaaaaattagccaggcatggtggtggacggcatagggaagaggaggaatatggtatccaatctaagggaaagagaagatggggacaaagacagaacctagcttccaggagg

SEQ ID NO: 4959 - DNA, 697 bp, Homo sapiens
tgttacacagatttttgtgatattctgtcacagccaccaaaagcaactagcatagtgcctcacacttcgcatttttaaaatttagggagttatttttttcctagaattgtggtattttaacatactactaagatgaagaccaaaaaatttttgggaaactggtcactcctaggtaattaaataatcagaaaaagatatgaggctgggcatggtgacacacgcctgtaatcccagcactctgggaggccaaggtgggcggattatctgaggtcaggagttcgagaccagcctggacaacatggcaaaaccccatctctactgaaaatataaaatagctgggcgtggtggtaagcacctgtagtcctggctacttgagaggctgaggcgtgagaatcgcttgaacccaggaggcaagggttgcagtgaaccaaaattgcaccactgcactgcagtctacacgacagagcaagactctgtctcaaaaaaaaaaaaaaaawatggaaaagtgcttgtacacaaatgatgtcctggttctggtttcaggtattaattgaagaaacagatcaattatggaaagttcattgtcaccgagactttaaggaagaaagacccgaagagtatgagtcgtggcgagagatgtacctgcggcttcaggacgcccgagagcagcggctacgagtactaacaaagaatatcc

SEQ ID NO: 4960 - DNA, 785 bp, Homo sapiens
gtccaatcccttcacttcacagggggtaaactgagtctcagaagatcaagtcacttgcccaaggccacgcagctagtaagttgctgtggttggatttgaccgtaataaccatcggctactgaatgcccatcatgtgtcagccatttgctgagttttttctttttttttctttttgagacagagtcttgctctgtcgccaggctggagtgcagtggcgcgatgtcggctcactgcaacctctgcctcccgggttcaagcgattctcctgcttcagcctcccgagtagctgggactacaggctcgcgccaccacgcctagctaatttttgtatttttagtagagacggggtttcatcatgttggctaggatggtctcgatcttttgacctcgtgatccgcccgcctcggcctcccaaagtgctgggattacaggcgtgagccaccgsgcccggcctgctgagttctttaattgcattatttcatttaatactcactgtgatcctatgaaacagatactattctttccaccttacagacggggaaacggagtctcagaataggggaaatgacttaaggtgtcacaatggccagtagcagacccaggagtagtctttaggtctggccgtgcacaaagccccatgctctcaagctgtaaccccgctatcaagaaagtggttatgcaagtgggcctgtgagctctcaacgtctaagccgtgcgcatgtgagacagcgataagctcgcgttctccagtctccagggccttatcattcctcacgctttccttc

SEQ ID NO: 4961 - DNA, 201 bp, Homo sapiens
aagagttagagacctcggcctcctggtcagtggagcccttggcctcatgcctggtgggctaagcgggcccagctggggtttgaggtaggggaggccttggyttggccccagcagctccagggccctgagttcctgccagaggctggagagcaggcagctgctgcttttcctggtccttggtaggggagggtcctcaggctt

SEQ ID NO: 4962 - DNA, 550 bp, Homo sapiens
aacggcagagcacatgtagtaatttgttaacacgaaacggcagccttccaacttttgcactgaaacacggggatttaccctttgggggattaaaaatgttgatacgcaaagccaaaggctaatgaataggattcagtggcttgctggcaatatttaaatatttctgtccgggagcgcaaactcttctgcagttatttagaaaagtagggagttaaaccaaactataatactctcccgtgcgtctccactttccccagcccgaaaaggagctaccagcgctgtactgcccctttaagacctgctggctctcgggctctacaaaagggagtgacctctgggctttgacagctctcctaataactaccacggcgcaggccccgcccacctagctaccagcagcgccgattggccggcgggccggtatcccgcgctgtgattggcccgtcgcttcccctgagmgaacctttagaactctgagacaatattctgttacattgtagcaaaatggcgactgtcattcacaaccccctgaaagcgtaagtaagactaa
